(19) United States
(12) Patent Application Publication
(10) Pub. No.: US 2017/0268008 A1
(43) Pub. Date: Sep. 21, 2017

(54) DIAGNOSTIC AND THERAPEUTIC TARGETING OF DNMT-1 ASSOCIATED RNA IN HUMAN CANCER

(71) Applicant: CASE WESTERN RESERVE UNIVERSITY, Cleveland, OH (US)

(72) Inventors: Ahmed Khalil, Cleveland, OH (US); Sanford Markowitz, Cleveland, OH (US)

(21) Appl. No.: 15/529,399

(22) PCT Filed: Nov. 24, 2015
(86) PCT No.: PCT/US15/62352

§ 371 Date: May 24, 2017

Related U.S. Application Data
(60) Provisional application No. 62/083,603, filed on Nov. 24, 2014.

(51) Int. Cl. C12N 15/113; C12Q 1/68

(52) U.S. Cl. CPC C12N 15/1137; C12Y 201/01037; C12Q 1/6886; C12N 2310/14; C12N 2310/141; C12N 2310/11; C12Q 2600/154; C12Q 2600/178

(57) ABSTRACT

A method for treating cancer in a subject in need thereof includes administering to cancer cells of the subject an agent effective to modulate the level of DNMT1-associated RNA and/or the interaction of DNMT1-associated RNA and DNMT1 in the cancer cells of the subject. Embodiments described herein relate to RNAs (e.g., IncRNAs) associated with DNA methyltransferase 1 (DNMTI-associated RNA) in human cancer cells, methods and compositions of modulating the levels of DNMTI-associated RNA and/or the interaction of DNMT1-associated RNA and DNMT1 in cancer cells of the subject to treat cancer cells or a subject in need thereof, and/or methods of measuring the expression profile of DNMT1 associated RNA to determine whether the subject has cancer or an increased risk of cancer and/or the efficacy of a therapeutic regimen agent.

### RELATED APPLICATION

[0001] This application claims priority from U.S. Provisional Application No. 62/083,603, filed Nov. 24, 2014, the subject matter of which is incorporated herein by reference in its entirety.

### BACKGROUND

[0002] Epigenetic regulation of gene expression in mammalian cells involve highly coordinated functions of chromatin remodeling complexes, histone modifying enzymes, DNA methyltransferases as well as chromatin readers. These interactions serve to activate or repress gene expression at specific genomic loci to ensure tissue specific gene expression patterns. However, how these ubiquitous epigenetic effectors are recruited, assembled and stabilized at specific genomic loci in distinct cell types is yet to be fully elucidated. We previously identified extensive interactions between human long intergenic non coding RNAs (lincRNAs) and several chromatin modifying complexes including the polycomb repressive complex (PRC2). These interactions are required for proper PRC2 mediated gene expression programs, and emerging evidence suggests a regulatory role of lincRNAs in recruiting and organizing PRC2 as well as other epigenetic complexes on chromatin.

[0003] The human genome encodes over 8,300 lincRNAs, which constitute a subclass of long non coding RNAs (lncRNAs) that are transcribed from genomic regions that do not overlap any protein coding genes. Although lincRNAs are capped, spliced and polyadenylated, many lincRNAs are retained in the nucleus. Recent genetic studies that knocked out several lincRNAs in mice provided in vivo evidence that some lincRNAs are required for embryonic development and tissue morphogenesis. Furthermore, recent studies have implicated lincRNAs in various human diseases including several cancers. In these studies, lincRNAs have been shown to exert either tumor suppressor or oncogenic effects sometimes by largely unknown mechanisms.

[0004] DNA methylation is an important epigenetic mark that is typically associated with repressed genes in mammalian cells. Three distinct DNA methyltransferases (DNMT1, DNMT3a and DNMT3b) are known to regulate DNA methylation patterns in mammals. Genome wide studies of DNA methylation in tumors have shown that the cancer genomes are largely hyopmethylated, however, the promoters of some tumor suppressors become hypermethylated. Currently, there is a great interest in understanding how DNA methylation patterns become deregulated in human cancers with the hope that these studies might lead to novel insights into tumorgenesis as well as future therapeutic interventions.

### SUMMARY

[0005] Embodiments described herein relate to RNAs (e.g., lncRNAs) associated with DNA methyltransferase 1 (DNMT1-associated RNA) in human cancer cells, methods and compositions of modulating the levels of DNMT1-associated RNA and/or the interaction of DNMT1-associated RNA and DNMT1 in cancer cells of the subject to treat cancer cells or a subject in need thereof, and/or methods of measuring the expression profile of DNMT1-associated RNA to determine whether the subject has cancer or an increased risk of cancer and/or the efficacy of a therapeutic regimen agent.

[0006] In some embodiments, cancer in a subject can be treated by administering an agent to cancer cells of the subject that is effective to modulate the level of DNMT1-associated RNA and/or the interaction of DNMT1-associated RNA and DNMT1 in the cancer cells. The cancer can be, for example, breast cancer or colon cancer. In other embodiments, the DNMT1-associated RNA can be DNMT1-associated long non-coding RNA.

[0007] In some embodiments, the agent administered to the cancer cells to treat cancer in the subject can be effective to decrease the level of DNMT1-associated RNA, which is over expressed in the cancer cells compared to normal cells. An agent effective to decrease the level of DNMT1-associated RNA, which is over expressed in the cancer cells, can include an RNA inhibitor of the DNMT1-associated RNA, such as siRNA, miRNA, stRNA, snRNA, shRNA, and antisense nucleic acids to the DNMT1-associated RNA.

[0008] In one example, the DNMT1-associated RNA that is over expressed or upregulated, can include at least one of linc-GATA5-1, linc-FAM84B-9, linc-OR10H4, linc-DUSP26-6, linc-CCDC40-1, linc-CSPP1, linc-ASPSCR1, linc-U2AF1-5, linc-BEAN1, linc-EFR3A-7, linc-SLC25A45-5, linc-SEMA3A, linc-CXXC4-1, linc-EFR3A-4, linc-JAKMIP3-3, linc-KIAA1755-4, linc-EPHB4, linc-GAD1-1, linc-IGFBP2-3, linc-CCDC122-4, linc-NADSYN1-2, linc-DUSP26-1, linc-EFR3A-5, linc-TCF20, linc-RSPH1-1, linc-DUXA-2, linc-RTEL1, linc-INO80, linc-UBE3C-2, linc-STIM2-1, linc-VEZF1, linc-GPR183-2, linc-WHAMM-1, linc-FRMPD1, linc-MIB2, linc-SERTAD2-4, linc-HAAO-4, linc-CDH5-3, linc-NDUFAF2-3, linc-PPM1J, linc-LY6H, linc-MKLN1-2, linc-SERPIND1, linc-TCP10-5, linc-PPIAL4F-1, linc-BIRC7-3, linc-S100B-2, linc-C1QTNF9B, linc-PXN, linc-SRL, linc-ZNF692-6, linc-BDH1-3, linc-RALGAPB, linc-MYOD1, linc-OR4F16-9, linc-MUC20-3, linc-BTBD6-1, linc-CDK13-1, linc-ZNF8-2, linc-HIST1H2AI-2, linc-OR7C2-1, linc-MZF1-2, linc-CMPK1-3, linc-ARHGAP28-9, linc-NACC1, linc-BMS1-4, linc-TCP11L2-1, linc-CANX-1, linc-KCTD7-2, linc-TMEM105-2, linc-MRPS31, linc-RGL4-1, linc-METTL14-1, linc-NDUFB4-5, linc-ARF5-2, linc-NBPF15-1, linc-PHF10, linc-NADSYN1-1, linc-TMEM183B-1, linc-CALCOCO2-3, linc-BDH1-2, linc-ADAMTSL4, linc-RPS7-1, linc-ATP6V1C2-4, linc-FSCN2-1, linc-TUBGCP3-2, linc-HOXD1, linc-TGFBRAP1, linc-NOP14-3, linc-IER5L-2, linc-ASPRV1-1, linc-TPT1-2, linc-OAF-6, linc-COX5B-3, linc-ZBED1-4, linc-HIST1H2AI-1, linc-CALCOCO2-2, linc-ARF6-1, linc-MAP7-BP, linc-LOC285033-4, linc-ZNF674, linc-HTR5A-1, linc-GPR179, linc-RPP40, linc-SATB2-2, linc-MUC20-2, linc-ZNF516-4, linc-STX17, linc-CDH6-7, linc-SERHL2-3, or linc-OR4F16-4.

[0009] In another example, the DNMT-1 associated RNA that is over expressed can include at least one of linc-TMEM169-3, linc-HEATR6-2, linc-TM4SF4-2, linc-DACT2-3, linc-SAFB-2, linc-PTPRS-2, linc-ZPBP2, linc-MGAT4A, linc-DUSP26-5, linc-CA5A-2, linc-MERTK-2, linc-ABCA5-3, linc-GUCA2B, linc-HOXD1, linc-FOXA1-2, linc-EGLN1-2, linc-LRRC49-4, linc-TMEM18-13, linc-ANKRD27, linc-LAMA1-5, linc-TMEM183B-1, linc-UGDH, linc-PKMYT1, linc-PPP1R1B, linc-WFDC2-2, linc-DYNC1LI1-2, linc-DHX37-22, linc-OAF-6, linc-ODF3B, linc-ARHGAP28-9, linc-DUSP26-6, linc-EVX2-8, linc-COPZ2, linc-DLGAP5-1, linc-XRCC4-3, linc-ZIC5, linc-KIN-5, linc-NACC1, linc-SERTAD2-4, linc-ASPSCR1, or linc-KIAA0232.

[0010] In yet another example, the DNMT-1 associated RNA can include at least one of linc-DUSP26-6, linc-ASPSCR1, linc-SERTAD2-4, linc-ARHGAP28-9, linc-NACC1, linc-TMEM183B-1, linc-HOXD1, or linc-OAF-6.

[0011] In other embodiments, the agent administered to the cancer cells to treat cancer in the subject can be effective to increase the level of DNMT1-associated RNA that is under expressed or downregulated in the cancer cells compared to normal cells. The agent can include, for example, a nucleic acid encoding the under expressed DNMT1-associated RNA that is administered to the cancer cells using, for example, an expression vector.

[0012] In one example, the DNMT1-associated RNA that is under expressed or down regulated in the cancer cells can include at least one of linc-SMAD3, linc-ANXA8L2-2, linc-TRAK1, linc-AP2B1-2, linc-UTRN, linc-TBX18, linc-GPR65-6, linc-STIL-2, linc-ENPP6-2, linc-GABRA5-6, linc-MRPS18C, linc-EGFL7-1, linc-KLHL31-2, linc-PSMA8-3, linc-ZNF404, linc-HMGB2, linc-OAF-4, linc-FRG1-5, linc-HIST1H3A, linc-TMEM56-3, linc-DBT-3, linc-GNAI1-2, linc-BCL2L10, linc-EPHA6-1, linc-PLDN, linc-GABRA5-5, linc-ACO1-2, linc-NEDD4L-1, linc-MTRNR2L1-2, linc-FAM155B, linc-GIMAP8-1, linc-MAGI2-3, linc-DHX37-17, linc-KLF6-3, linc-RAP1GAP2-1, linc-TMPRSS2-2, linc-C10orf57-3, linc-GPR157-3, linc-LAMA4-2, linc-STIM1, linc-RFC2-2, linc-MRGPRF-1, linc-DEFB105B-2, linc-CTDSP2-1, linc-PRPS1L1, linc-SLC19A1-4, linc-C10orf43-2, linc-COX4NB-8, linc-HES1-3, linc-FIGNL1, linc-OAF-2, linc-COX4NB-9, linc-FBXL5-2, linc-TMEM220-2, linc-KCNMB2-5, linc-KIAA0141, linc-DHX37-19, linc-RGMA-7, linc-ID2-1, linc-SHISA6-1, linc-SYT4-1, linc-TRIML2-5, linc-DHFRL1-4, linc-RGS9-1, linc-ODF2L, linc-SLC22A16, linc-ZPBP2, linc-AGMAT-3, linc-MT1B, linc-GRPEL1-1, linc-PFDN4-2, linc-OPRK1-4, linc-ZNF583-1, linc-PFDN4-3, linc-SAMSN1-3, linc-USP3-1, linc-SHISA6-2, linc-ADAM29-3, linc-ZEB2-7, linc-MLL5, linc-FOXF1-3, linc-BTBD3-3, linc-GPATCH2-9, linc-ARHGEF37-2, linc-KLF6-2, linc-CLMN-1, linc-FOXG1-4, linc-TAAR9-1, linc-GTPBP8, linc-ADAR, linc-SAFB-2, linc-CXorf49B-2, linc-SLCO2A1-1, linc-PTPRS-2, linc-EPCAM, linc-LPHN2-1, linc-AMN1, linc-FAM55D, linc-FAM75A6-4, or linc-PHOX2B-2.

[0013] In another example, the DNMT1-associated RNA that is under expressed or down regulated in the cancer cells can include at least one of linc-GHRH, linc-VPS36-1, linc-C20orf79, linc-AUTS2-5, linc-ISLR2-3, linc-ZNF692-6, linc-IER3IP1, linc-MANSC1, linc-CXADR-3, linc-ZFHX3-4, linc-ZNF404, linc-FAAH2-2, linc-CLRN2-1, linc-ATP6V1C2-3, linc-METTL14-2, linc-MAP1LC3B-2, linc-TCP11L2-1, linc-GARS-1, linc-NOP14-3, linc-ANKRD55-6, linc-ARFIP1-8, linc-C17orf87, linc-AMAC1, linc-SYT4-1, linc-HTR1D, linc-WNT7B-2, linc-MAP1LC3B2-2, linc-TP53TG3B-6, linc-TMEM105-2, linc-MICB, linc-PLGLB2, linc-OR4F16-9, linc-RBM10, linc-KIAA1712-5, linc-CBLB-6, linc-ATG2B-2, linc-ADI1, linc-SPRY3-1, linc-BEAN1, linc-SHOX-5, linc-WIPF3, linc-SHOX-4, linc-DCAF17-1, linc-TNFRSF14, linc-GPR65-6, linc-PHF10, linc-ZNF692-5, linc-POLR3A-1, linc-LOC389493-2, linc-AP2B1-2, linc-LRRTM3-3, linc-SFMBT1, linc-BTBD6-1, linc-MTHFD2, linc-PRSS42, linc-RGMB-1, linc-ITIH2-10, linc-TPBG-3, linc-TMEM194A, linc-FRG2C-3, linc-ZKSCAN1-1, linc-HEATR2-2, linc-CDK13-1, linc-GIMAP8-1, linc-FAM101A-2, linc-IFITM5, linc-LRRTM3-2, linc-METTL14-1, linc-GTPBP8, linc-KLF13-1, linc-SLC5A3-2, linc-BET3L, linc-TUBGCP3-2, linc-CDH1, linc-PTGR2, linc-CDK17-4, linc-COG3-3, linc-CBR1-1, linc-CCR8-3, linc-LOC150786, linc-FRG1-5, linc-GABRA5-7, linc-DYDC1-5, linc-CREB1-1, linc-LEPROTL1-7, linc-C6orf145-3, linc-HIST1H2AG-4, linc-THSD4, linc-HS3ST3A1-1, linc-KLRC1, linc-ZNF583-1, linc-ZNF253-2, linc-UTRN, linc-ATP6V1C2-4, linc-GRPEL1-1, linc-TTC7A-2, linc-COGS-1, linc-IFLTD1, linc-GALNTL5-1, linc-PCM1, linc-ISLR2-2, linc-DHCR7-2, linc-HES5-2, linc-USP8, linc-VPS8-2, linc-RGL4-1, linc-CEBPG, linc-CRH-2, linc-DR1, linc-UBQLN2, linc-MTRNR2L9-3, linc-ID2-3, linc-TMED5, linc-RAB23-4, linc-NDFIP2-1, linc-ARHGAP5, linc-WRNIP1-2, linc-ANKRD20A1-14, linc-TLN2-1, linc-VPS8-3, linc-CNTNAP4, linc-CHMP2B-1, linc-CXADR-2, linc-LOC285033-5, linc-ARHGAP28-2, linc-RGMA-7, linc-BMS1-3, linc-Clorf86, linc-CASP10-1, linc-SYNPO2-2, linc-FAM71F2-1, linc-TNKS-3, linc-MMADHC-3, linc-LEPROTL1-6, linc-BCL2L10, linc-OR5AU1, linc-SH3BGRL2-1, linc-TRIM43B-2, linc-ALG2-5, linc-C8orf79-2, linc-CEBPB-1, linc-RPS14, linc-RRP12, linc-FAM98A-3, linc-TACC3, linc-MPPE1-4, linc-IDH3B-1, linc-C8orf79-4, linc-DEFB105B-3, linc-HSF2-1, linc-EPT1, linc-RPGRIP1-3, linc-MUC20-1, linc-MAGI2-3, linc-SNTG2-3, linc-DEFB105B-2, linc-TCP10-4, linc-NAV3-1, linc-CSTB-6, linc-TCF7L2-3, linc-SPNS3, linc-FURIN, linc-HNRNPA1-3, linc-C1orf63, linc-SPAST-2, linc-EGFL7-1, linc-THBS2-3, linc-FRMPD1, linc-ITGB2-3, linc-TRIP11, linc-FER-1, linc-TMEM132D-1, linc-C14orf4-2, linc-GPATCH2-9, linc-ZNF236-4, linc-TTLL7-2, linc-APBA2-3, linc-ZNF32-5, linc-ALDH1A3-1, linc-GBP5-2, linc-DYNC1I1-2, linc-NR2F2-3, linc-B3GAT2-4, linc-CEP57-3, linc-CPPED1-3, linc-PHYHIPL, linc-C9orf170-1, linc-SPACA3, linc-FAM103A1, linc-INHBB, linc-ANKRD20A1-2, linc-CRP, linc-CPEB2-16, linc-PLCH2, linc-SHISA6-1, linc-ODZ3-5, linc-Clorf43-2, linc-HIST1H2AI-1, linc-BEND7-1, linc-CTSD-3, linc-RBKS-1, linc-PRSS38, linc-HAAO-6, linc-SLC5A9-4, linc-ZEB2-7, linc-FAM75A6-7, linc-DCT-2, linc-LY75, linc-DKK3-3, linc-TRPM5, linc-USPL1-1, linc-TPT1-2, linc-OBP2B, linc-C5orf38-4, linc-MMEL1-3, linc-GALNTL5-3, linc-ZDHHC6-2, linc-C5orf38-5, linc-HAAO-4, linc-CXorf36-3, linc-WDTC1, linc-LOC100129335-2, linc-DYNC2H1-4, linc-PEPD-1, linc-HDDC2-4, linc-TPT1-1, linc-USP16-5, linc-PICK1, linc-RHOXF1-3, linc-OXCT1-1, linc-BOD1-2, linc-ARHGEF37-2, linc-AQPEP, linc-PABPC4L-1, linc-MAP1LC3B-5, linc-TOX3-2, linc-FRMD6-2, linc-DEK-6, linc-ZFP64-5, linc-PRKAA2-8, linc-ABCA5-7, linc-PRKACG-2, and combinations thereof.

[0014] In yet another example, the DNMT1-associated RNA that is under expressed or down regulated in the cancer cells can include at least one of linc-AP2B1-2, linc-UTRN, linc-GPR65-6, linc-EGFL7-1, linc-ZNF404, linc-FRG1-5, linc-BCL2L10, linc-GIMAP8-1, linc-MAGI2-3, linc-DEFB105B-2, linc-C1orf43-2, linc-RGMA-7, linc-SHISA6-1, linc-SYT4-1, linc-GRPEL1-1, linc-ZNF583-1, linc-ZEB2-7, linc-GPATCH2-9, linc-ARHGEF37-2, or linc-GTPBP8.

[0015] Other embodiments described herein relate to a method of analyzing tissue in a subject having or suspected of having cancer. The method includes obtaining an expression profile from a sample of tissue obtained from the subject, wherein the expression profile comprises the level of at least one DNMT1-associated RNA selected from the group consisting of Tables 1, 2, 3, 4, 5, and 6. The expression profile from the sample is then compared to an expression profile of a control or standard. A decrease in the expression of the at least one DNMT1-associated RNA selected from Table 1, 3, or 5 and/or increase in the expression of the at least one DNMT1-associated RNA selected from Table 2, 4, or 6 is indicative of the subject having cancer or an increased risk of cancer. In some embodiments, the cancer is colon cancer or breast cancer.

[0016] Still other embodiments relate to a method of predicting whether a subject has cancer or an increased risk of cancer. The method includes obtaining an expression profile from a sample of tissue obtained from the subject, wherein the expression profile comprises the level of at least one DNMT1-associated RNA selected from the group consisting of Tables 1, 2, 3, 4, 5, and 6. The expression profile from the sample is then compared to an expression profile of a control or standard and whether the subject has cancer or an increased risk of cancer is predicted based on (i) deviation of the expression profile of the sample from a control or standard derived from a healthy individual or population of healthy individuals, or (ii) the similarity of expression profiles of the sample and a control or standard derived from an individual or population of individuals who have or have had the cancer. In some embodiments, a decrease in the expression of the at least one DNMT1-associated RNA selected from Table 1, 3, or 5 and/or an increase in the expression of the at least one DNMT1-associated RNA selected from Table 2, 4, or 6 is indicative of the subject having cancer or an increased risk of cancer. In some embodiments, the cancer is colon cancer or breast cancer.

[0017] Other embodiments relate to a method of monitoring a subject's response to a treatment regimen for cancer. The method includes administering a therapeutic regimen to the subject. An expression profile from a sample of cancer cells is obtained from the subject, wherein the expression profile comprises the level of at least one DNMT1-associated RNA selected from the group consisting of Tables 1, 2, 3, 4, 5, and 6. The expression profile from the sample is compared to an expression profile of a control or standard. An increase in the expression of the at least one DNMT1-associated RNA selected from Table 1, 3, or 5 and/or decrease in the expression of the at least one DNMT1-associated RNA selected from Table 2, 4, or 6 is indicative of an increased efficacy of the therapeutic regimen. In some embodiments, the cancer is colon cancer or breast cancer.

### BRIEF DESCRIPTION OF THE DRAWINGS

[0018] FIGS. 1(A-H) illustrate: (A) Outline of the experimental strategy utilized to identify DNMT1-associated RNAs. (B) Western blot analysis using an anti-flag-DNMT1 antibody confirms the specific immunoprecipitation (IP) of DNMT1, but not other highly abundant nuclear proteins (histone H3, U1-70K). An IP with anti-IgG antibody demonstrates that there is no detectable background. (C) Heatmap of lncRNAs in input sample versus each of the three biological replicates of DNMT1 RIPs. (D) Heatmap of mRNAs in input versus the three biological replicates of DNMT1 RIPs. (E) Pie chart showing the number of DNMT1-associated lncRNAs versus all lncRNAs expressed in input. (F) Pie chart showing the number of DNMT1-associated mRNAs versus mRNAs expressed in input. (G-H) Graphs show the expression levels of DNMT1-bound lncRNAs and mRNAs versus non-bound lncRNAs and mRNAs in HCT116 cells.

[0019] FIGS. 2(A-D) illustrate: (A) A graph showing quantitative real-time PCR (qRT-PCR) of DACOR1 across a panel of human normal tissues. (B) RNA in situ hybridization of the expression of DACOR1 in human colon tissues and colon crypts as one of the major cell types that express it. Close examination of colon cells (small panel) reveals that DACOR1 is retained in the nucleus and potentially interacts with chromatin. (C) Expression analysis of DACOR1 in a cohort of 22 colon cancer tumors versus 22 matched normal tissues in RNA-seq datasets obtained from TCGA demonstrates that DACOR1 is down-regulated in colon tumors. (D) Examining the expression of DACOR1 by qRT-PCR in 8 normal colon samples and 21 patient-derived colon cancer cell lines with limited passage in culture demonstrates that DACOR1 is highly repressed in most colon cancer cells.

[0020] FIGS. 3(A-E) illustrate: (A) A graph showing validation of the interaction between DNMT1 and DACOR1 by RIP-qPCR. DACOR1 shows a 7-fold enrichment in flag-DNMT1 RIP over IgG RIP. (B) The highly abundant nuclear RNA U1 shows no enrichment in flag-DNMT1 RIP versus IgG RIP. (C) A schematic drawing showing, induction of DACOR1 expression in two distinct patient-derived colon cancer cell lines (V481 and V852) enhances DNA methylation at multiple genomic loci in trans. (D) Induction of DACOR1 expression in patient-derived colon cancer cell lines (V866 and V852) results in up-regulation of tight junction protein 1 (TJP1), suggesting a potential role for DACOR1 in maintaining an epithelial state of colon cells. (E) The colon cancer cell lines V481, V852 and V866 were transduced with either a control or DACOR1 lentivirus.

[0021] FIGS. 4 (A-D) illustrate: (A) qRT-PCR confirmations of RNA-seq data that DACOR1 represses several genes (SMAD6, FST and INHBE) involved in the repression of the TGF-beta/BMP signaling pathway. (B) qRT-PCR validations of RNA-seq data that DACOR1 represses the expression of key genes that are involved in amino acid biosynthesis and metabolism; (C) Western blot analyses demonstrate that DACOR1 induction leads to the repression of PHGDH and CBS but does not affect PKM2 or Actin protein levels in V852 cells; (D) Induction of DACOR1 reduces the activity of PKM2, which is known to be dependent on serine, without affecting overall PKM2 protein levels.

[0022] FIGS. 5(A-C) illustrate: (A) Confirmation of DACOR1 pull down from crosslinked cell lysates by specific complementary probes, in comparison with non-specific probes. (B) Intersection of DACOR1 genome occupancy sites near annotated protein-coding genes identified in this study by ChIRP-seq and differentially methylated regions (DMRs) in colon tumors/normal colon identified by Simmer et al. reveals a significant overlap. This further supports the role of DACOR1, via its interaction with DNMT1, in regulating genome-wide DNA methylation. (C) A proposed model of how DNMT1-DACOR1 interactions regulate DNA methylation and gene expression.

[0023] FIG. 6 illustrates expression analysis of DACOR1 by qRT-PCR in normal colon vs patient-derived colon cancer cell lines represented as a cluster graph.

[0024] FIGS. 7(A-B) illustrates (A) Expression analysis by qRT-PCR of DACOR1 in normal colon, two colon cancer cell lines transduced with a control lentivirus, and same two cell lines transduced with a DACOR1 lentivirus. (B) RNA in situ demonstrates lack of DACOR1 expression in colon cancer cells (left panel), and the appropriate induction and nuclear localization of DACOR1 using a lentivirus (right panel).

[0025] FIG. 8 illustrates DACOR1 induction results in decreased growth of colon cancer cells. A field view of colon cancer cells that were transduced with either a control or DACOR1 lentivirus. We quantified the effect of DACOR1 on the growth of colon cancer cells using colony formation assays.

[0026] FIGS. 9(A-B) illustrate: (A-B) qRT-PCR expression analysis of DACOR1 in the colon cancer cell lines V703 and V425 post transduction with either a control or DACOR1 lentivirus (CMV promoter). (C-D) DACOR1 has minor effects on colony formation in V703 and V425 cells. These are colon cancer cell lines that maintain some endogenous levels of DACOR1 expression.

[0027] FIGS. 10(A-C) illustrate graphs showing linc-SAFB-2 (TINCR) is upregulated in breast cancer (A-B) and knock down of TINCR results in reduced tumor growth (C).

### DETAILED DESCRIPTION

[0028] For convenience, certain terms employed in the entire application (including the specification, examples, and appended claims) are collected here. Unless defined otherwise, all technical and scientific terms used herein have the same meaning as commonly understood by one of ordinary skill in the art to which this invention belongs.

[0029] It is to be understood that this invention is not limited to the particular methodology, protocols, cell lines, plant species or genera, constructs, and reagents described as such. It is also to be understood that the terminology used herein is for the purpose of describing particular embodiments only, and is not intended to limit the scope of the present invention which will be limited only by the appended claims.

[0030] The term “pharmaceutically acceptable carrier” refers to any of the standard pharmaceutical carriers, such as a phosphate buffered saline solution, water, emulsions such as an oil/water or water/oil emulsion, and various types of wetting agents. The term also encompasses any of the agents approved by a regulatory agency of the US Federal government or listed in the US Pharmacopeia for use in animals, including humans.

[0031] The term “subject” refers to any organism or animal to whom treatment or prophylaxis treatment is desired. Such animals include mammals, preferably a human. The term “subject” also refers to any living organism from which a biological sample can be obtained. The term includes, but is not limited to, humans, non-human primates such as chimpanzees and other apes and monkey species; farm animals such as cattle, sheep, pigs, goats and horses, domestic subjects such as dogs and cats, laboratory animals including rodents such as mice, rats and guinea pigs, and the like. The term does not denote a particular age or sex. Thus, adult and newborn subjects, as well as fetuses, whether male or female, are intended to be covered. The term “subject” is also intended to include living organisms susceptible to conditions or diseases caused or contributed bacteria, pathogens, disease states or conditions as generally disclosed, but not limited to, throughout this specification. Examples of subjects include humans, dogs, cats, cows, goats, and mice. The term subject is further intended to include transgenic species. In another embodiment, the subject is an experimental animal or animal substitute as a disease model.

[0032] The term “mammal” or “mammalian” are used interchangeably herein, and encompass their normal meaning. While the methods and compositions described herein are most desirably intended for efficacy in humans, they may also be employed in domestic mammals such as canines, felines, and equines, as well as in mammals of particular interest, e.g., zoo animals, farmstock, transgenic animals, rodents and the like.

[0033] The terms “gene silencing” or “gene silenced” in reference to an activity of a RNAi molecule, for example a siRNA or miRNA refers to a decrease in the mRNA level in a cell for a heterologous target gene by at least about 5%, about 10%, about 20%, about 30%, about 40%, about 50%, about 60%, about 70%, about 80%, about 90%, about 95%, about 99%, about 100% of the mRNA level found in the cell without the presence of the miRNA or RNA interference molecule. In one embodiment, the mRNA levels are decreased by at least about 70%, about 80%, about 90%, about 95%, about 99%, about 100%. As used herein, the “reduced” or “gene silencing” refers to lower, preferably significantly lower, more preferably the expression of the nucleotide sequence is not detectable.

[0034] The term “double-stranded RNA” molecule, “RNAi molecule”, or “dsRNA” molecule refers to a sense RNA fragment of a nucleotide sequence and an antisense RNA fragment of the nucleotide sequence, which both comprise nucleotide sequences complementary to one another, thereby allowing the sense and antisense RNA fragments to pair and form a double-stranded RNA molecule. In some embodiments, the terms refer to a double-stranded RNA molecule capable, when expressed, is at least partially reducing the level of the mRNA of the heterologous target gene. In particular, the RNAi molecule is complementary to a synthetic RNAi target sequence located in a non-coding region of the heterologous target gene.

[0035] The terms “RNA interference”, “RNAi”, and “dsRNAi” are used interchangeably herein and refer to nucleic acid molecules capable of gene silencing.

[0036] The term “RNAi” refers to any type of interfering RNA, including siRNAi, shRNAi, stRNAi, endogenous microRNA and artificial microRNA. For instance, it includes sequences previously identified as siRNA, regardless of the mechanism of down-stream processing of the RNA. The term “siRNA” also refers to a nucleic acid that forms a double stranded RNA, which double stranded RNA has the ability to reduce or inhibit expression of a gene or target gene when the siRNA is present or expressed in the same cell as the target gene. The double stranded RNA siRNA can be formed by the complementary strands. In one embodiment, a siRNA refers to a nucleic acid that can form a double stranded siRNA. The sequence of the siRNA can correspond to the full length target gene, or a subsequence thereof. Typically, the siRNA is at least about 10-50 nucleotides in length (e.g., each complementary sequence of the double stranded siRNA is about 10-22 nucleotides in length, and the double stranded siRNA is about 10-22 base pairs in length, preferably about 19-22 base nucleotides, preferably about 17-19 nucleotides in length, e.g., 10, 11, 12, 13, 14, 15, 16, 17, 18, 19, 20, 21, or 22 nucleotides in length).

[0037] The terms “shRNA” or “small hairpin RNA” (also called stem loop) is a type of siRNA. In one embodiment, these shRNAs are composed of a short, e.g., about 10 to about 25 nucleotide, antisense strand, followed by a nucleotide loop of about 5 to about 9 nucleotides, and the analogous sense strand. Alternatively, the sense strand can precede the nucleotide loop structure and the antisense strand can follow.

[0038] The term a “stem-loop structure” refers to a nucleic acid having a secondary structure that includes a region of nucleotides, which are known or predicted to form a double strand (stem portion) that is linked on one side by a region of predominantly single-stranded nucleotides (loop portion). The terms “hairpin” and “fold-back” structures are also used herein to refer to stem-loop structures. Such structures are well known in the art and the term is used consistently with its known meaning in the art. The actual primary sequence of nucleotides within the stem-loop structure is not critical to the practice of the invention as long as the secondary structure is present. As is known in the art, the secondary structure does not require exact base-pairing. Thus, the stem may include one or more base mismatches. Alternatively, the base-pairing may be exact, i.e., not include any mismatches. In some instances the precursor microRNA molecule may include more than one stem-loop structure. The multiple stem-loop structures may be linked to one another through a linker, such as, for example, a nucleic acid linker or by a microRNA flanking sequence or other molecule or some combination thereof. The actual primary sequence of nucleotides within the stem-loop structure is not critical as long as the secondary structure is present. As is known in the art, the secondary structure does not require exact base-pairing. Thus, the stem may include one or more base mismatches. Alternatively, the base pairing may not include any mismatches.

[0039] The term “hairpin RNA” refers to any self-annealing double stranded RNA molecule. In its simplest representation, a hairpin RNA consists of a double stranded stem made up by the annealing RNA strands, connected by a single stranded RNA loop, and is also referred to as a “pan-handle RNA”. However, the term “hairpin RNA” is also intended to encompass more complicated secondary RNA structures comprising self-annealing double stranded RNA sequences, but also internal bulges and loops. The specific secondary structure adapted will be determined by the free energy of the RNA molecule, and can be predicted for different situations using appropriate software such as FOLDRNA (Zuker and Stiegler (1981) Nucleic Acids Res 9(1):133-48; Zuker, M. (1989) Methods Enzymol. 180, 262-288).

[0040] The term “agent” refers to any entity which is normally absent or not present at the levels being administered, in the cell. An agent may be selected from a group comprising; chemicals; small molecules; nucleic acid sequences; nucleic acid analogues; proteins; peptides; aptamers; antibodies; or fragments thereof. A nucleic acid sequence may be RNA or DNA, and may be single or double stranded, and can be selected from a group comprising; nucleic acid encoding a protein of interest, oligonucleotides, nucleic acid analogues, for example peptide-nucleic acid (PNA), pseudo-complementary PNA (pc-PNA), locked nucleic acid (LNA), etc. Such nucleic acid sequences include, for example, but not limited to, nucleic acid sequence encoding proteins, for example that act as transcriptional repressors, antisense molecules, ribozymes, small inhibitory nucleic acid sequences, for example but not limited to RNAi, shRNAi, siRNA, micro RNAi (mRNAi), antisense oligonucleotides etc. A protein and/or peptide or fragment thereof can be any protein of interest, for example, but not limited to; mutated proteins; therapeutic proteins; truncated proteins, wherein the protein is normally absent or expressed at lower levels in the cell. Proteins can also be selected from a group comprising; mutated proteins, genetically engineered proteins, peptides, synthetic peptides, recombinant proteins, chimeric proteins, antibodies, midibodies, tribodies, humanized proteins, humanized antibodies, chimeric antibodies, modified proteins and fragments thereof. The agent may be applied to the media, where it contacts the cell and induces its effects. Alternatively, the agent may be intracellular within the cell as a result of introduction of the nucleic acid sequence into the cell and its transcription resulting in the production of the nucleic acid and/or protein environmental stimuli within the cell. In some embodiments, the agent is any chemical, entity or moiety, including without limitation synthetic and naturally-occurring non-proteinaceous entities. In certain embodiments the agent is a small molecule having a chemical moiety. For example, chemical moieties included unsubstituted or substituted alkyl, aromatic, or heterocyclyl moieties including macrolides, leptomycins and related natural products or analogues thereof. Agents can be known to have a desired activity and/or property, or can be selected from a library of diverse compounds.

[0041] The terms “a reduction” of the level of an RNA, mRNA, rRNA, tRNA, or lncRNA includes a decrease in the level of the RNA, mRNA, rRNA, tRNA, or lncRNA in the cell or organism. “At least a partial reduction” of the level of the RNA, mRNA, rRNA, tRNA or lncRNA means that the level is reduced at least about 10%, at least about 25%, at least 50% or more relative to a cell or organism in which the level of RNA, mRNA, rRNA, tRNA or lncRNA is not reduced by some means. “A substantial reduction” of the level of RNA, mRNA, rRNA, tRNA or lncRNA means that the level is reduced at least about 75%, at least about 85% or more. The reduction can be determined by methods with which the skilled worker is familiar Thus, the reduction can be determined for example by reverse transcription (quantitative RT-PCR), ELISA (enzyme-linked immunosorbent assay), Western blotting, radioimmunoassay (RIA) or other immunoassays and fluorescence-activated cell analysis (FACS).

[0042] In its broadest sense, the term “substantially complementary”, when used herein with respect to a nucleotide sequence in relation to a reference or target nucleotide sequence, means a nucleotide sequence having a percentage of identity between the substantially complementary nucleotide sequence and the exact complementary sequence of said reference or target nucleotide sequence of at least 60%, at least 70%, at least 80% or 85%, at least 90%, at least 93%, at least 95% or 96%, at least 97% or 98%, at least 99% or 100% (the later being equivalent to the term “identical” in this context). For example, identity is assessed over a length of at least 10 nucleotides, or at least 11, 12, 13, 14, 15, 16, 17, 18, 19, 20, 21, 22 or up to 50 nucleotides of the entire length of the nucleic acid sequence to said reference sequence (if not specified otherwise below). Sequence comparisons are carried out using default GAP analysis with the University of Wisconsin GCG, SEQWEB application of GAP, based on the algorithm of Needleman and Wunsch (Needleman and Wunsch (1970) J MoI. Biol. 48: 443-453; as defined above). A nucleotide sequence “substantially complementary” to a reference nucleotide sequence hybridizes to the reference nucleotide sequence under low stringency conditions, preferably medium stringency conditions, most preferably high stringency conditions (as defined above).

[0043] The term “substantially identical”, when used herein with respect to a nucleotide sequence, means a nucleotide sequence corresponding to a reference or target nucleotide sequence, wherein the percentage of identity between the substantially identical nucleotide sequence and the reference or target nucleotide sequence is at least 60%, at least 70%, at least 80% or 85%, at least 90%, at least 93%, at least 95% or 96%, at least 97% or 98%, at least 99% or 100% (the later being equivalent to the term “identical” in this context). For example, identity is assessed over a length of 10-22 nucleotides, such as at least 10, 11, 12, 13, 14, 15, 16, 17, 18, 19, 20, 21, 22 or up to 50 nucleotides of a nucleic acid sequence to said reference sequence (if not specified otherwise below). Sequence comparisons are carried out using default GAP analysis with the University of Wisconsin GCG, SEQWEB application of GAP, based on the algorithm of Needleman and Wunsch (Needleman and Wunsch (1970) J MoI. Biol. 48: 443-453; as defined above). A nucleotide sequence “substantially identical” to a reference nucleotide sequence hybridizes to the exact complementary sequence of the reference nucleotide sequence (i.e., its corresponding strand in a double-stranded molecule) under low stringency conditions, preferably medium stringency conditions, most preferably high stringency conditions (as defined above). Homologues of a specific nucleotide sequence include nucleotide sequences that encode an amino acid sequence that is at least 24% identical, at least 35% identical, at least 50% identical, at least 65% identical to the reference amino acid sequence, as measured using the parameters described above, wherein the amino acid sequence encoded by the homolog has the same biological activity as the protein encoded by the specific nucleotide. The term “substantially non-identical” refers to a nucleotide sequence that does not hybridize to the nucleic acid sequence under stringent conditions.

[0044] The term “disease” or “disorder” is used interchangeably herein, refers to any alternation in state of the body or of some of the organs, interrupting or disturbing the performance of the functions and/or causing symptoms such as discomfort, dysfunction, distress, or even death to the person afflicted or those in contact with a person. A disease or disorder can also related to a distemper, ailing, ailment, malady, disorder, sickness, illness, complaint, inderdisposion, affection.

[0045] The terms “malignancy” or “cancer” are used interchangeably herein and refers to any disease of an organ or tissue in mammals characterized by poorly controlled or uncontrolled multiplication of normal or abnormal cells in that tissue and its effect on the body as a whole. Cancer diseases within the scope of the definition comprise benign neoplasms, dysplasias, hyperplasias as well as neoplasms showing metastatic growth or any other transformations like e.g. leukoplakias which often precede a breakout of cancer. The term “tumor” or “tumor cell” are used interchangeably herein, refers to the tissue mass or tissue type of cell that is undergoing abnormal proliferation.

[0046] The term “biological sample” or “sample” as used herein refers to a cell or population of cells or a quantity of tissue or fluid from a subject. Most often, the sample has been removed from a subject, but the term “biological sample” can also refer to cells or tissue analyzed in vivo, i.e., without removal from the subject. Often, a “biological sample” will contain cells from the animal, but the term can also refer to non-cellular biological material, such as non-cellular fractions of blood, saliva, or urine, that can be used to measure gene expression levels. Biological samples include, but are not limited to, tissue biopsies, scrapes (e.g., buccal scrapes), whole blood, plasma, serum, urine, saliva, cell culture, or cerebrospinal fluid. Biological samples also include tissue biopsies, cell culture. A biological sample or tissue sample can refers to a sample of tissue or fluid isolated from an individual, including but not limited to, for example, blood, plasma, serum, tumor biopsy, urine, stool, sputum, spinal fluid, pleural fluid, nipple aspirates, lymph fluid, the external sections of the skin, respiratory, intestinal, and genitourinary tracts, tears, saliva, milk, cells (including but not limited to blood cells), tumors, organs, and also samples of in vitro cell culture constituent. In some embodiments, the sample is from a resection, bronchoscopic biopsy, or core needle biopsy of a primary or metastatic tumor, or a cellblock from pleural fluid. In addition, fine needle aspirate samples are used. Samples may be either paraffin-embedded or frozen tissue. The sample can be obtained by removing a sample of cells from a subject, but can also be accomplished by using previously isolated cells (e.g., isolated by another person), or by performing the methods of the invention in vivo. Biological sample also refers to a sample of tissue or fluid isolated from an individual, including but not limited to, for example, blood, plasma, serum, tumor biopsy, urine, stool, sputum, spinal fluid, pleural fluid, nipple aspirates, lymph fluid, the external sections of the skin, respiratory, intestinal, and genitourinary tracts, tears, saliva, milk, cells (including but not limited to blood cells), tumors, organs, and also samples of in vitro cell culture constituent. In some embodiments, the biological samples can be prepared, for example biological samples may be fresh, fixed, frozen, or embedded in paraffin.

[0047] The term “tissue” is intended to include intact cells, blood, blood preparations such as plasma and serum, bones, joints, muscles, smooth muscles, and organs.

[0048] The term “treatment” refers to any treatment of a pathologic condition in a subject, particularly a human subject, and includes one or more of the following: (a) preventing a pathological condition from occurring in a subject which may be predisposition to the condition but has not yet been diagnosed with the condition and, accordingly, the treatment constitutes prophylactic treatment for the disease or condition; (b) inhibiting the pathological condition, i.e., arresting its development, (c) relieving the pathological condition, i.e. causing a regression of the pathological condition; or (d) relieving the conditions mediated by the pathological condition.

[0049] The term “computer” refers to any non-human apparatus that is capable of accepting a structured input, processing the structured input according to prescribed rules, and producing results of the processing as output. Examples of a computer include: a computer; a general purpose computer; a supercomputer; a mainframe; a super mini-computer; a mini-computer; a workstation; a micro-computer; a server; an interactive television; a hybrid combination of a computer and an interactive television; and application-specific hardware to emulate a computer and/or software. A computer can have a single processor or multiple processors, which can operate in parallel and/or not in parallel. A computer also refers to two or more computers connected together via a network for transmitting or receiving information between the computers. An example of such a computer includes a distributed computer system for processing information via computers linked by a network.

[0050] The term “computer-readable medium” may refer to any storage device used for storing data accessible by a computer, as well as any other means for providing access to data by a computer. Examples of a storage-device-type computer-readable medium include: a magnetic hard disk; a floppy disk; an optical disk, such as a CD-ROM and a DVD; a magnetic tape; a memory chip.

[0051] The term “software” is used interchangeably herein with “program” and refers to prescribed rules to operate a computer. Examples of software include: software; code segments; instructions; computer programs; and programmed logic.

[0052] The term a “computer system” may refer to a system having a computer, where the computer comprises a computer-readable medium embodying software to operate the computer.

[0053] The term “statistically significant” or “significantly” refers to statistical significance and generally means a two standard deviation (2SD) below normal, or lower, concentration of the marker. The term refers to statistical evidence that there is a difference. It is defined as the probability of making a decision to reject the null hypothesis when the null hypothesis is actually true. The decision is often made using the p-value.

[0054] The term “optional” or “optionally” means that the subsequent described event, circumstance or substituent may or may not occur, and that the description includes instances where the event or circumstance occurs and instances where it does not.

[0055] Other than in the operating examples, or where otherwise indicated, all numbers expressing quantities of ingredients or reaction conditions used herein should be understood as modified in all instances by the term “about.” The term “about” when used in connection with percentages can mean.+−0.1%.

[0056] As used herein, the word “or” means any one member of a particular list and also includes any combination of members of that list. The words “comprise,” “comprising,” “include,” “including,” and “includes” when used in this specification and in the following claims are intended to specify the presence of one or more stated features, integers, components, or steps, but they do not preclude the presence or addition of one or more other features, integers, components, steps, or groups thereof.

[0057] In this specification and the appended claims, the singular forms “a,” “an,” and “the” include plural references unless the context clearly dictates otherwise, and therefore “a” and “an” are used herein to refer to one or to more than one (i.e., at least one) of the grammatical object of the article. By way of example, “an element” means one element or more than one element, and reference to a composition for delivering “an agent” includes reference to one or more agents.

[0058] Compositions or methods “comprising” one or more recited elements may include other elements not specifically recited. For example, a composition that comprises an inhibitor of HOTAIR encompasses both an inhibitor of HOTAIR but may also include other agents or other components. By way of further example, a composition that comprises elements A and B also encompasses a composition consisting of A, B and C. The terms “comprising” means “including principally, but not necessary solely”. Furthermore, variation of the word “comprising”, such as “comprise” and “comprises”, have correspondingly varied meanings. The term “consisting essentially” means “including principally, but not necessary solely at least one”, and as such, is intended to mean a “selection of one or more, and in any combination.”

[0059] Embodiments described herein relate to RNAs (e.g., lncRNAs, lincRNAs, and mRNAs) associated with DNA methyltransferase DNMT1 (DNMT1-associated RNA) in human cancer cells, methods and compositions of modulating the levels of DNMT1-associated RNA and/or the interaction of DNMT1-associated RNA with DNMT1 in the cancer cells of the subject to treat cancer cells or a subject in need thereof, and/or methods of measuring the expression profile of DNMT1-associated RNA to determine whether the subject has cancer or an increased risk of cancer and/or measure the efficacy of a therapeutic regimen or agent. It was discovered that human DNMT1 can interact or associate with non-coding RNAs, such as human lncRNAs, suggesting that in addition to histone modifications, DNA methylation is also indirectly regulated by non-coding RNA, such as lncRNAs. DNA methylation is an important epigenetic mark for the regulation of gene expression in mammalian cells from early embryonic development to fully differentiated post-mitotic cells. The fact that DNMT1 associates with certain lncRNAs suggests that these lncRNAs can influence DNMT1 genomic occupancy and/or activities, thereby indirectly regulating the methylome. Thus, deregulation of one or more of DNMT1-associated lncRNAs in human disease, such as cancer, would lead to changes in DNA methylation patterns and significant changes in gene expression without any detectable changes in DNMT1 expression levels.

[0060] It was found that under expressed or over-expressed DNMT1-associated RNA in cancer cells compared to normal cells can be targeted by agents that promote induction or inhibition, respectively, of the under expressed or over-expressed DNMT1-associated RNA to change DNA methylation patterns within the cancer cells without affecting DNMT1 protein levels in the cancer cells. This change in methylation pattern caused by such induction or inhibition can be used to inhibit cancer cell growth, proliferation, migration and/or metastasis.

[0061] Without wishing to be bound by theory, it is believe that DNMT1-associated RNA mediated changes in DNA methylation patterns are potentially caused by DNMT1-associated RNA recruitment of DNMT1 to specific sites of the genome, similar to what has been observed of lncRNA-mediated recruitment of histone-modifying enzymes. Also, DNMT1-associated RNA can potentially affect DNMT1 activity at specific CpG sites, by regulating protein components of the DNMT1 macromolecular protein complex.

[0062] As shown in the Examples, gene expression analyses of DNMT1-associated RNA demonstrated that colon cancer cell lines and breast cancer cell lines dramatically repress expression of some DNMT1-associated RNA but dramatically promote expression of others compared to normal colon cells and breast cells. Restoring DNMT1-associated RNA expression levels to those similar to normal cells resulted in reduced growth of the cancer cells, potentially via the modulation of several pathways.

[0063] By way of example, the DNMT1-associated RNA, DACOR1 interacts with specific genomic loci and potentially recruits DNMT1 to establish DNA methylation patterns and/or regulate gene expression. The DNMT1-DACOR1 axis results in modulating the expression of many genes, directly and indirectly, including those involved in amino acid metabolism. DACOR1 down-regulates the expression of several genes that inhibit TGF-β/BMP signaling and thus potentially enhances TGF-β/BMP signaling, which is known to exert a tumor-suppressor activity in the colon. DACOR1 also down-regulates several genes involved in metabolism including de novo serine biosynthesis (e.g., PHGDH, PSAT1). Serine is an essential precursor for the synthesis of proteins, nucleic acid and lipids; thus, it is critical for cancer cell growth. Furthermore, DACOR1 induction is sufficient to attenuate pyruvate kinase M2 (PKM2) activity, which is highly dependent on serine. PKM2 has been recently implicated as a key gene in cancer metabolism; thus, the identification of a lncRNA that attenuates its activity, although indirectly, can provide a therapeutic window in cancer biology. Lastly, DACOR1-mediated down-regulation of CBS, the deficiency of which is known to lead to increased levels of methionine and, consequently, SAM, the key methyl donor utilized by DNA methyl transferases to methylate DNA, is also highly significant. These findings suggest that DNMT1, via its interaction with RNA, such as DACOR1, indirectly regulates the cellular levels of SAM and, subsequently, genome-wide DNA methylation and that reestablishing down regulated DACOR-1 levels in cancer cells to levels found in comparable normal cells can be used to inhibit cancer growth and proliferation.

[0064] Moreover, it was found that linc-SAFB-2 (TINCR) is upregulated in HER2-positive breast cancer as compared to matched normal tissues. Knock down of TINCR results in HER2 positive breast cancer results in reduced breast cancer and proliferation (FIG. 10) growth.

[0065] Accordingly, DNMT1-associated RNA can regulate the human methylome and the genome-wide changes in DNA methylation across numerous cancer types. Modulating aberrant levels of DNMT1-associated RNA and/or the interaction of DNMT1-associated RNA and DNMT1 in the cancer cells of the subject can be used to treat cancer cells or a subject in need thereof. Furthermore, as many DNMT1-associated RNAs have tissue-specific expression patterns, they can serve as biomarkers for analyzing, diagnosing, prognosing, or determining the prognosis of cancer cells, as well as for determining or monitoring therapeutic strategies or regimens for cancer cell treatment in a subject with potentially less side-effects.

[0066] Tables 1-6 list DNMT1-associated RNAs include DACOR1 (linc-SMAD3) whose expression levels are downregulated or upregulated, respectively, in colon and breast cancer cells compared to normal colon and breast cells. As discussed in the Example, a RIP protocol was used to identify potential interactions between DNMT1 and RNAs. Isolated co-immunoprecipitated RNAs were quantified and RNA-seq libraries from independent biological replicates of DNMT1 RIPs were sequenced and mapped to the human genome. Fpkm values for mRNAs and lncRNAs were detected in the input sample and each of the biological replicates of DNMT1 RIP-seq. The average fpkm of each transcript in the biological replicates of DNMT1 RIP-seq was divided by the fpkm in the input sample to generate fold changes. LncRNAs and mRNAs were identified as DNMT1-associated RNAs based on a 2-fold change or higher. To rule out non-specific co-immunoprecipitation of highly abundant RNAs with DNMT1, the expression of all DNMT1-bound were compared versus DNMT1-unbound lncRNAs and mRNAs to determine downregulated or upregulated lincRNAs in the cancer cell compared to normal cells. The downregulated and upregulated DNMT1-associated RNA so identified can be used in methods and compositions of treating a subject with cancer in need thereof, and/or methods of measuring the expression profile of DNMT1-associated RNA to determine whether the subject has cancer or an increased risk of cancer and/or measure the efficacy of a therapeutic regimen or agent.

TABLE 1
DOWNREGULATED IN COLON TUMORS

| lncRNA | [T]/[N] | SEQ ID NO. |
|---|---|---|
| linc-ANXA8L2-2 | 0.499 | SEQ ID NO: 1 |
| linc-TRAK1 | 0.498 | SEQ ID NO: 2 |
| line-AP2B1-2 | 0.498 | SEQ ID NO: 3 |
| linc-UTRN | 0.498 | SEQ ID NO: 4 |
| linc-TBX18 | 0.497 | SEQ ID NO: 5 |
| linc-GPR65-6 | 0.490 | SEQ ID NO: 6 |
| linc-STIL-2 | 0.488 | SEQ ID NO: 7 |
| linc-ENPP6-2 | 0.487 | SEQ ID NO: 8 |
| linc-GABRA5-6 | 0.486 | SEQ ID NO: 9 |
| linc-MRPS18C | 0.483 | SEQ ID NO: 10 |
| linc-EGFL7-1 | 0.482 | SEQ ID NO: 11 |
| linc-KLHL31-2 | 0.479 | SEQ ID NO: 12 |
| linc-PSMA8-3 | 0.479 | SEQ ID NO: 13 |
| linc-ZNF404 | 0.472 | SEQ ID NO: 14 |
| linc-HMGB2 | 0.470 | SEQ ID NO: 15 |
| linc-OAF-4 | 0.470 | SEQ ID NO: 16 |
| linc-FRG1-5 | 0.468 | SEQ ID NO: 17 |
| linc-HIST1H3A | 0.456 | SEQ ID NO: 18 |
| linc-TMEM56-3 | 0.449 | SEQ ID NO: 19 |
| linc-DBT-3 | 0.440 | SEQ ID NO: 20 |
| linc-GNAI1-2 | 0.437 | SEQ ID NO: 21 |
| linc-BCL2L10 | 0.435 | SEQ ID NO: 22 |
| linc-EPHA6-1 | 0.434 | SEQ ID NO: 23 |
| linc-PLDN | 0.431 | SEQ ID NO: 24 |
| linc-GABRA5-5 | 0.430 | SEQ ID NO: 25 |
| linc-ACO1-2 | 0.430 | SEQ ID NO: 26 |
| linc-NEDD4L-1 | 0.425 | SEQ ID NO: 27 |
| linc-MTRNR2L1-2 | 0.417 | SEQ ID NO: 28 |
| linc-FAM155B | 0.412 | SEQ ID NO: 29 |
| linc-GIMAP8-1 | 0.410 | SEQ ID NO: 30 |
| linc-MAGI2-3 | 0.409 | SEQ ID NO: 31 |
| linc-DHX37-17 | 0.408 | SEQ ID NO: 32 |
| linc-KLF6-3 | 0.403 | SEQ ID NO: 33 |
| linc-RAP1GAP2-1 | 0.400 | SEQ ID NO: 34 |
| linc-TMPRSS2-2 | 0.400 | SEQ ID NO: 35 |
| linc-C10orf57-3 | 0.397 | SEQ ID NO: 36 |
| linc-GPR157-3 | 0.395 | SEQ ID NO: 37 |
| linc-LAMA4-2 | 0.391 | SEQ ID NO: 38 |
| linc-STIM1 | 0.390 | SEQ ID NO: 39 |
| linc-RFC2-2 | 0.387 | SEQ ID NO: 40 |
| linc-MRGPRF-1 | 0.385 | SEQ ID NO: 41 |
| linc-DEFB105B-2 | 0.384 | SEQ ID NO: 42 |
| linc-CTDSP2-1 | 0.382 | SEQ ID NO: 43 |
| linc-PRPS1L1 | 0.381 | SEQ ID NO: 44 |
| linc-SLC19A1-4 | 0.380 | SEQ ID NO: 45 |
| linc-C1orf43-2 | 0.379 | SEQ ID NO: 46 |
| linc-COX4NB-8 | 0.377 | SEQ ID NO: 47 |
| linc-HES1-3 | 0.374 | SEQ ID NO: 48 |
| linc-FIGNL1 | 0.374 | SEQ ID NO: 49 |
| linc-OAF-2 | 0.362 | SEQ ID NO: 50 |
| linc-COX4NB-9 | 0.360 | SEQ ID NO: 51 |
| linc-FBXL5-2 | 0.350 | SEQ ID NO: 52 |
| linc-TMEM220-2 | 0.348 | SEQ ID NO: 53 |
| linc-KCNMB2-5 | 0.339 | SEQ ID NO: 54 |
| linc-KIAA0141 | 0.338 | SEQ ID NO: 55 |
| linc-DHX37-19 | 0.329 | SEQ ID NO: 56 |
| linc-RGMA-7 | 0.327 | SEQ ID NO: 57 |
| linc-ID2-1 | 0.324 | SEQ ID NO: 58 |
| linc-SHISA6-1 | 0.322 | SEQ ID NO: 59 |
| linc-SYT4-1 | 0.319 | SEQ ID NO: 60 |
| linc-TRIML2-5 | 0.314 | SEQ ID NO: 61 |
| linc-DHFRL1-4 | 0.303 | SEQ ID NO: 62 |
| linc-RGS9-1 | 0.298 | SEQ ID NO: 63 |
| linc-ODF2L | 0.296 | SEQ ID NO: 64 |
| linc-SLC22A16 | 0.294 | SEQ ID NO: 65 |
| linc-ZPBP2 | 0.272 | SEQ ID NO: 66 |
| linc-AGMAT-3 | 0.264 | SEQ ID NO: 67 |
| linc-MT1B | 0.252 | SEQ ID NO: 68 |
| linc-GRPEL1-1 | 0.238 | SEQ ID NO: 69 |
| linc-PFDN4-2 | 0.236 | SEQ ID NO: 70 |
| linc-OPRK1-4 | 0.232 | SEQ ID NO: 71 |
| linc-ZNF583-1 | 0.231 | SEQ ID NO: 72 |
| linc-PFDN4-3 | 0.231 | SEQ ID NO: 73 |
| linc-SAMSN1-3 | 0.230 | SEQ ID NO: 74 |
| linc-USP3-1 | 0.214 | SEQ ID NO: 75 |
| linc-SHISA6-2 | 0.213 | SEQ ID NO: 76 |
| linc-ADAM29-3 | 0.210 | SEQ ID NO: 77 |
| linc-ZEB2-7 | 0.209 | SEQ ID NO: 78 |
| linc-MLL5 | 0.191 | SEQ ID NO: 79 |
| linc-FOXF1-3 | 0.191 | SEQ ID NO: 80 |
| linc-BTBD3-3 | 0.188 | SEQ ID NO: 81 |
| linc-GPATCH2-9 | 0.187 | SEQ ID NO: 82 |
| linc-ARHGEF37-2 | 0.180 | SEQ ID NO: 83 |
| linc-KLF6-2 | 0.176 | SEQ ID NO: 84 |
| linc-CLMN-1 | 0.169 | SEQ ID NO: 85 |
| linc-FOXG1-4 | 0.161 | SEQ ID NO: 86 |
| linc-TAAR9-1 | 0.160 | SEQ ID NO: 87 |
| linc-GTPBP8 | 0.149 | SEQ ID NO: 88 |
| linc-ADAR | 0.127 | SEQ ID NO: 89 |
| linc-SAFB-2 | 0.120 | SEQ ID NO: 90 |
| linc-CXorf49B-2 | 0.108 | SEQ ID NO: 91 |
| linc-SLCO2A1-1 | 0.098 | SEQ ID NO: 92 |
| linc-PTPRS-2 | 0.095 | SEQ ID NO: 93 |
| linc-EPCAM | 0.092 | SEQ ID NO: 94 |
| linc-LPHN2-1 | 0.085 | SEQ ID NO: 95 |
| linc-AMN1 | 0.085 | SEQ ID NO: 96 |
| linc-FAM55D | 0.065 | SEQ ID NO: 97 |
| linc-FAM75A6-4 | 0.057 | SEQ ID NO: 98 |
| linc-PHOX2B-2 | 0.018 | SEQ ID NO: 99 |
| linc-SMAD3 | | SEQ ID NO: 522 |

TABLE 2
UPREGULATED IN COLON TUMORS

| lncRNA | [T]/[N] | SEQ ID NO. |
|---|---|---|
| linc-GATA5-1 | 163.265 | SEQ ID NO: 100 |
| linc-FAM84B-9 | 34.817 | SEQ ID NO: 101 |
| linc-OR10H4 | 17.546 | SEQ ID NO: 102 |
| linc-DUSP26-6 | 15.893 | SEQ ID NO: 103 |
| linc-CCDC40-1 | 11.889 | SEQ ID NO: 104 |
| linc-CSPP1 | 11.092 | SEQ ID NO: 105 |
| linc-ASPSCR1 | 7.932 | SEQ ID NO: 106 |
| linc-U2AF1-5 | 7.298 | SEQ ID NO: 107 |
| linc-BEAN1 | 6.947 | SEQ ID NO: 108 |
| linc-EFR3A-7 | 6.846 | SEQ ID NO: 109 |
| linc-SLC25A45-5 | 6.544 | SEQ ID NO: 110 |
| linc-SEMA3A | 6.024 | SEQ ID NO: 111 |
| linc-CXXC4-1 | 5.815 | SEQ ID NO: 112 |
| linc-EFR3A-4 | 5.538 | SEQ ID NO: 113 |
| linc-JAKMIP3-3 | 5.406 | SEQ ID NO: 114 |
| linc-KIAA1755-4 | 5.392 | SEQ ID NO: 115 |
| linc-EPHB4 | 5.247 | SEQ ID NO: 116 |
| linc-GAD1-1 | 5.172 | SEQ ID NO: 117 |
| linc-IGFBP2-3 | 5.068 | SEQ ID NO: 118 |
| linc-CCDC122-4 | 4.934 | SEQ ID NO: 119 |
| linc-NADSYN1-2 | 4.788 | SEQ ID NO: 120 |
| linc-DUSP26-1 | 4.725 | SEQ ID NO: 121 |
| linc-EFR3A-5 | 4.613 | SEQ ID NO: 122 |
| linc-TCF20 | 4.446 | SEQ ID NO: 123 |
| linc-RSPH1-1 | 4.343 | SEQ ID NO: 124 |
| linc-DUXA-2 | 4.325 | SEQ ID NO: 125 |
| linc-RTEL1 | 4.313 | SEQ ID NO: 126 |
| linc-INO80 | 4.085 | SEQ ID NO: 127 |
| linc-UBE3C-2 | 4.032 | SEQ ID NO: 128 |
| linc-STIM2-1 | 3.860 | SEQ ID NO: 129 |
| linc-VEZF1 | 3.857 | SEQ ID NO: 130 |
| linc-GPR183-2 | 3.829 | SEQ ID NO: 131 |
| linc-WHAMM-1 | 3.755 | SEQ ID NO: 132 |
| linc-FRMPD1 | 3.724 | SEQ ID NO: 133 |
| linc-MIB2 | 3.472 | SEQ ID NO: 134 |
| linc-SERTAD2-4 | 3.464 | SEQ ID NO: 135 |
| linc-HAAO-4 | 3.434 | SEQ ID NO: 136 |
| linc-CDH5-3 | 3.306 | SEQ ID NO: 137 |
| linc-NDUFAF2-3 | 3.298 | SEQ ID NO: 138 |
| linc-PPM1J | 3.164 | SEQ ID NO: 139 |
| linc-LY6H | 3.159 | SEQ ID NO: 140 |
| linc-MKLN1-2 | 3.151 | SEQ ID NO: 141 |
| linc-SERPIND1 | 3.136 | SEQ ID NO: 142 |
| linc-TCP10-5 | 3.132 | SEQ ID NO: 143 |
| linc-PPIAL4F-1 | 3.022 | SEQ ID NO: 144 |
| linc-BIRC7-3 | 3.022 | SEQ ID NO: 145 |
| linc-S100B-2 | 2.974 | SEQ ID NO: 146 |
| linc-C1QTNF9B | 2.932 | SEQ ID NO: 147 |
| linc-PXN | 2.931 | SEQ ID NO: 148 |
| linc-SRL | 2.931 | SEQ ID NO: 149 |
| linc-ZNF692-6 | 2.927 | SEQ ID NO: 150 |
| linc-BDH1-3 | 2.918 | SEQ ID NO: 151 |
| linc-RALGAPB | 2.908 | SEQ ID NO: 152 |
| linc-MYOD1 | 2.890 | SEQ ID NO: 153 |
| linc-OR4F16-9 | 2.861 | SEQ ID NO: 154 |
| linc-MUC20-3 | 2.854 | SEQ ID NO: 155 |
| linc-BTBD6-1 | 2.835 | SEQ ID NO: 156 |
| linc-CDK13-1 | 2.821 | SEQ ID NO: 157 |
| linc-ZNF8-2 | 2.789 | SEQ ID NO: 158 |
| linc-HIST1H2AI-2 | 2.748 | SEQ ID NO: 159 |
| linc-OR7C2-1 | 2.742 | SEQ ID NO: 160 |
| linc-MZF1-2 | 2.735 | SEQ ID NO: 161 |
| linc-CMPK1-3 | 2.663 | SEQ ID NO: 162 |
| linc-ARHGAP28-9 | 2.653 | SEQ ID NO: 163 |
| linc-NACC1 | 2.635 | SEQ ID NO: 164 |
| linc-BMS1-4 | 2.618 | SEQ ID NO: 165 |
| linc-TCP11L2-1 | 2.607 | SEQ ID NO: 166 |
| linc-CANX-1 | 2.564 | SEQ ID NO: 167 |
| linc-KCTD7-2 | 2.554 | SEQ ID NO: 168 |
| linc-TMEM105-2 | 2.538 | SEQ ID NO: 169 |
| linc-MRPS31 | 2.514 | SEQ ID NO: 170 |
| linc-RGL4-1 | 2.509 | SEQ ID NO: 171 |
| linc-METTL14-1 | 2.491 | SEQ ID NO: 172 |
| linc-NDUFB4-5 | 2.485 | SEQ ID NO: 173 |
| linc-ARF5-2 | 2.478 | SEQ ID NO: 174 |
| linc-NBPF15-1 | 2.467 | SEQ ID NO: 175 |
| linc-PHF10 | 2.454 | SEQ ID NO: 176 |
| linc-NADSYN1-1 | 2.450 | SEQ ID NO: 177 |
| linc-TMEM183B-1 | 2.434 | SEQ ID NO: 178 |
| linc-CALCOCO2-3 | 2.415 | SEQ ID NO: 179 |
| linc-BDH1-2 | 2.405 | SEQ ID NO: 180 |
| linc-ADAMTSL4 | 2.398 | SEQ ID NO: 181 |
| linc-RPS7-1 | 2.374 | SEQ ID NO: 182 |
| linc-ATP6V1C2-4 | 2.364 | SEQ ID NO: 183 |
| linc-FSCN2-1 | 2.340 | SEQ ID NO: 184 |
| linc-TUBGCP3-2 | 2.328 | SEQ ID NO: 185 |
| linc-HOXD1 | 2.314 | SEQ ID NO: 186 |
| linc-TGFBRAP1 | 2.301 | SEQ ID NO: 187 |
| linc-NOP14-3 | 2.273 | SEQ ID NO: 188 |
| linc-IER5L-2 | 2.253 | SEQ ID NO: 189 |
| linc-ASPRV1-1 | 2.230 | SEQ ID NO: 190 |
| linc-TPT1-2 | 2.206 | SEQ ID NO: 191 |
| linc-OAF-6 | 2.202 | SEQ ID NO: 192 |
| linc-COX5B-3 | 2.201 | SEQ ID NO: 193 |
| linc-ZBED1-4 | 2.200 | SEQ ID NO: 194 |
| linc-HIST1H2AI-1 | 2.182 | SEQ ID NO: 195 |
| linc-CALCOCO2-2 | 2.175 | SEQ ID NO: 196 |
| linc-ARF6-1 | 2.167 | SEQ ID NO: 197 |
| linc-MAP7-BP | 2.147 | SEQ ID NO: 198 |
| linc-LOC285033-4 | 2.146 | SEQ ID NO: 199 |
| linc-ZNF674 | 2.143 | SEQ ID NO: 200 |
| linc-HTR5A-1 | 2.130 | SEQ ID NO: 201 |
| linc-GPR179 | 2.072 | SEQ ID NO: 202 |
| linc-RPP40 | 2.069 | SEQ ID NO: 203 |
| linc-SATB2-2 | 2.067 | SEQ ID NO: 204 |
| linc-MUC20-2 | 2.062 | SEQ ID NO: 205 |
| linc-ZNF516-4 | 2.060 | SEQ ID NO: 206 |
| linc-STX17 | 2.037 | SEQ ID NO: 207 |
| linc-CDH6-7 | 2.035 | SEQ ID NO: 208 |
| linc-SERHL2-3 | 2.020 | SEQ ID NO: 209 |
| linc-OR4F16-4 | 2.004 | SEQ ID NO: 210 |

TABLE 3
DOWNREGULATED IN BREAST CANCER

| Gene_ID | lincRNA_ID | Fold_Change | SEQ ID NO. |
|---|---|---|---|
| XLOC_013732 | linc-GHRH | 0.499180468 | SEQ ID NO: 211 |
| XLOC_010622 | linc-VPS36-1 | 0.499124573 | SEQ ID NO: 212 |
| XLOC_013473 | linc-C20orf79 | 0.49850282 | SEQ ID NO: 213 |
| XLOC_006138 | linc-AUTS2-5 | 0.496339286 | SEQ ID NO: 214 |
| XLOC_011308 | linc-ISLR2-3 | 0.495656395 | SEQ ID NO: 215 |
| XLOC_000658 | linc-ZNF692-6 | 0.49203742 | SEQ ID NO: 216 |
| XLOC_012839 | linc-IER3IP1 | 0.491147796 | SEQ ID NO: 217 |
| XLOC_010020 | linc-MANSC1 | 0.489364178 | SEQ ID NO: 218 |
| XLOC_013868 | linc-CXADR-3 | 0.48782085 | SEQ ID NO: 219 |
| XLOC_012009 | linc-ZFHX3-4 | 0.485873656 | SEQ ID NO: 220 |
| XLOC_013350 | linc-ZNF404 | 0.484620723 | SEQ ID NO: 221 |
| XLOC_007996 | linc-FAAH2-2 | 0.483228361 | SEQ ID NO: 222 |
| XLOC_003471 | linc-CLRN2-1 | 0.483071468 | SEQ ID NO: 223 |
| XLOC_001343 | linc-ATP6V1C2-3 | 0.482227157 | SEQ ID NO: 224 |
| XLOC_003662 | linc-METTL14-2 | 0.481596879 | SEQ ID NO: 225 |
| XLOC_011819 | linc-MAP1LC3B-2 | 0.480798731 | SEQ ID NO: 226 |
| XLOC_009869 | linc-TCP11L2-1 | 0.479919818 | SEQ ID NO: 227 |
| XLOC_006037 | linc-GARS-1 | 0.478695771 | SEQ ID NO: 228 |
| XLOC_003860 | linc-NOP14-3 | 0.477680999 | SEQ ID NO: 229 |
| XLOC_004829 | linc-ANKRD55-6 | 0.477644486 | SEQ ID NO: 230 |
| XLOC_003734 | linc-ARFIP1-8 | 0.477497757 | SEQ ID NO: 231 |
| XLOC_012366 | linc-C17orf87 | 0.475047275 | SEQ ID NO: 232 |
| XLOC_012444 | linc-AMAC1 | 0.474129492 | SEQ ID NO: 233 |
| XLOC_012833 | linc-SYT4-1 | 0.47368454 | SEQ ID NO: 234 |
| XLOC_000734 | linc-HTR1D | 0.472227304 | SEQ ID NO: 235 |
| XLOC_014404 | linc-WNT7B-2 | 0.470874666 | SEQ ID NO: 236 |
| XLOC_009897 | linc-MAP1LC3B2-2 | 0.467638797 | SEQ ID NO: 237 |
| XLOC_011693 | linc-TP53TG3B-6 | 0.464429002 | SEQ ID NO: 238 |
| XLOC_012587 | linc-TMEM105-2 | 0.461761453 | SEQ ID NO: 239 |
| XLOC_005247 | linc-MICB | 0.461222628 | SEQ ID NO: 240 |
| XLOC_001560 | linc-PLGLB2 | 0.461144368 | SEQ ID NO: 241 |
| XLOC_000002 | linc-OR4F16-9 | 0.459563603 | SEQ ID NO: 242 |
| XLOC_007971 | linc-RBM10 | 0.457477759 | SEQ ID NO: 243 |
| XLOC_003782 | linc-KIAA1712-5 | 0.457345623 | SEQ ID NO: 244 |
| XLOC_003204 | linc-CBLB-6 | 0.453595662 | SEQ ID NO: 245 |
| XLOC_011117 | linc-ATG2B-2 | 0.453008229 | SEQ ID NO: 246 |
| XLOC_001952 | linc-ADI1 | 0.452755399 | SEQ ID NO: 247 |
| XLOC_008094 | linc-SPRY3-1 | 0.451474309 | SEQ ID NO: 248 |
| XLOC_011755 | linc-BEAN1 | 0.451290122 | SEQ ID NO: 249 |
| XLOC_008270 | linc-SHOX-5 | 0.449773022 | SEQ ID NO: 250 |
| XLOC_006031 | linc-WIPF3 | 0.449090252 | SEQ ID NO: 251 |
| XLOC_007907 | linc-SHOX-4 | 0.448976779 | SEQ ID NO: 252 |
| XLOC_001751 | linc-DCAF17-1 | 0.44797186 | SEQ ID NO: 253 |
| XLOC_000022 | linc-TNFRSF14 | 0.447491427 | SEQ ID NO: 254 |
| XLOC_010891 | linc-GPR65-6 | 0.442310612 | SEQ ID NO: 255 |
| XLOC_005940 | linc-PHF10 | 0.441180863 | SEQ ID NO: 256 |
| XLOC_000659 | linc-ZNF692-5 | 0.440733917 | SEQ ID NO: 257 |
| XLOC_008863 | linc-POLR3A-1 | 0.440296308 | SEQ ID NO: 258 |
| XLOC_006455 | linc-LOC389493-2 | 0.440180205 | SEQ ID NO: 259 |
| XLOC_012177 | linc-AP2B1-2 | 0.439517545 | SEQ ID NO: 260 |
| XLOC_008500 | linc-LRRTM3-3 | 0.439267969 | SEQ ID NO: 261 |
| XLOC_003130 | linc-SFMBT1 | 0.437923474 | SEQ ID NO: 262 |
| XLOC_010952 | linc-BTBD6-1 | 0.436794427 | SEQ ID NO: 263 |
| XLOC_001532 | linc-MTHFD2 | 0.436580148 | SEQ ID NO: 264 |
| XLOC_003111 | linc-PRSS42 | 0.43594778 | SEQ ID NO: 265 |
| XLOC_004484 | linc-RGMB-1 | 0.435374653 | SEQ ID NO: 266 |
| XLOC_008370 | linc-ITIH2-10 | 0.433890357 | SEQ ID NO: 267 |
| XLOC_005365 | linc-TPBG-3 | 0.433641735 | SEQ ID NO: 268 |
| XLOC_010097 | linc-TMEM194A | 0.426903381 | SEQ ID NO: 269 |
| XLOC_002710 | linc-FRG2C-3 | 0.424596849 | SEQ ID NO: 270 |
| XLOC_006188 | linc-ZKSCAN1-1 | 0.423272721 | SEQ ID NO: 271 |
| XLOC_005958 | linc-HEATR2-2 | 0.423084823 | SEQ ID NO: 272 |
| XLOC_006058 | linc-CDK13-1 | 0.421144709 | SEQ ID NO: 273 |
| XLOC_006293 | linc-GIMAP8-1 | 0.418403013 | SEQ ID NO: 274 |
| XLOC_009927 | linc-FAM101A-2 | 0.416533915 | SEQ ID NO: 275 |
| XLOC_009349 | linc-IFITM5 | 0.414748854 | SEQ ID NO: 276 |
| XLOC_008501 | linc-LRRTM3-2 | 0.413624264 | SEQ ID NO: 277 |
| XLOC_003663 | linc-METTL14-1 | 0.41231618 | SEQ ID NO: 278 |
| XLOC_002759 | linc-GTPBP8 | 0.412245121 | SEQ ID NO: 279 |
| XLOC_011201 | linc-KLF13-1 | 0.411702498 | SEQ ID NO: 280 |
| XLOC_013921 | linc-SLC5A3-2 | 0.40441622 | SEQ ID NO: 281 |
| XLOC_005816 | linc-BET3L | 0.401991105 | SEQ ID NO: 282 |
| XLOC_010734 | linc-TUBGCP3-2 | 0.401743633 | SEQ ID NO: 283 |
| XLOC_011769 | linc-CDH1 | 0.401444104 | SEQ ID NO: 284 |
| XLOC_010870 | linc-PTGR2 | 0.396154622 | SEQ ID NO: 285 |
| XLOC_010167 | linc-CDK17-4 | 0.394998914 | SEQ ID NO: 286 |
| XLOC_010377 | linc-COG3-3 | 0.394273047 | SEQ ID NO: 287 |
| XLOC_013929 | linc-CBR1-1 | 0.393741569 | SEQ ID NO: 288 |
| XLOC_002616 | linc-CCR8-3 | 0.393026799 | SEQ ID NO: 289 |
| XLOC_002323 | linc-LOC150786 | 0.392365681 | SEQ ID NO: 290 |
| XLOC_003839 | linc-FRG1-5 | 0.390890356 | SEQ ID NO: 291 |
| XLOC_011183 | linc-GABRA5-7 | 0.390854813 | SEQ ID NO: 292 |
| XLOC_008873 | linc-DYDC1-5 | 0.385000421 | SEQ ID NO: 293 |
| XLOC_001826 | linc-CREB1-1 | 0.383404985 | SEQ ID NO: 294 |
| XLOC_006752 | linc-LEPROTL1-7 | 0.383338011 | SEQ ID NO: 295 |
| XLOC_005587 | linc-C6orf145-3 | 0.382359817 | SEQ ID NO: 296 |
| XLOC_005214 | linc-HIST1H2AG-4 | 0.378694403 | SEQ ID NO: 297 |
| XLOC_011298 | linc-THSD4 | 0.37456428 | SEQ ID NO: 298 |
| XLOC_012393 | linc-HS3ST3A1-1 | 0.37414902 | SEQ ID NO: 299 |
| XLOC_010017 | linc-KLRC1 | 0.36789689 | SEQ ID NO: 300 |
| XLOC_013167 | linc-ZNF583-1 | 0.367389551 | SEQ ID NO: 301 |
| XLOC_012997 | linc-ZNF253-2 | 0.3670454 | SEQ ID NO: 302 |
| XLOC_005492 | linc-UTRN | 0.36526569 | SEQ ID NO: 303 |
| XLOC_001342 | linc-ATP6V1C2-4 | 0.364055202 | SEQ ID NO: 304 |
| XLOC_003872 | linc-GRPEL1-1 | 0.361963991 | SEQ ID NO: 305 |
| XLOC_001458 | linc-TTC7A-2 | 0.36182666 | SEQ ID NO: 306 |
| XLOC_010376 | linc-COG3-1 | 0.361425563 | SEQ ID NO: 307 |
| XLOC_010032 | linc-IFLTD1 | 0.360928317 | SEQ ID NO: 308 |
| XLOC_006296 | linc-GALNTL5-1 | 0.358756593 | SEQ ID NO: 309 |
| XLOC_006726 | linc-PCM1 | 0.358488671 | SEQ ID NO: 310 |
| XLOC_011309 | linc-ISLR2-2 | 0.353675742 | SEQ ID NO: 311 |
| XLOC_009493 | linc-DHCR7-2 | 0.352269235 | SEQ ID NO: 312 |
| XLOC_000678 | linc-HES5-2 | 0.350115239 | SEQ ID NO: 313 |
| XLOC_011248 | linc-USP8 | 0.348290046 | SEQ ID NO: 314 |
| XLOC_002952 | linc-VPS8-2 | 0.347817953 | SEQ ID NO: 315 |
| XLOC_014177 | linc-RGL4-1 | 0.345238799 | SEQ ID NO: 316 |
| XLOC_013042 | linc-CEBPG | 0.345038695 | SEQ ID NO: 317 |
| XLOC_007109 | linc-CRH-2 | 0.344933775 | SEQ ID NO: 318 |
| XLOC_000294 | linc-DR1 | 0.344051261 | SEQ ID NO: 319 |
| XLOC_007993 | linc-UBQLN2 | 0.343949716 | SEQ ID NO: 320 |
| XLOC_005332 | linc-MTRNR2L9-3 | 0.342479849 | SEQ ID NO: 321 |
| XLOC_001331 | linc-ID2-3 | 0.342191315 | SEQ ID NO: 322 |
| XLOC_000918 | linc-TMED5 | 0.340517434 | SEQ ID NO: 323 |
| XLOC_005753 | linc-RAB23-4 | 0.337208881 | SEQ ID NO: 324 |
| XLOC_010445 | linc-NDFIP2-1 | 0.336159171 | SEQ ID NO: 325 |
| XLOC_010791 | linc-ARHGAP5 | 0.335210921 | SEQ ID NO: 326 |
| XLOC_005127 | linc-WRNIP1-2 | 0.329920807 | SEQ ID NO: 327 |
| XLOC_007365 | linc-ANKRD20A1-14 | 0.329102587 | SEQ ID NO: 328 |
| XLOC_011280 | linc-TLN2-1 | 0.328482127 | SEQ ID NO: 329 |
| XLOC_002951 | linc-VPS8-3 | 0.323774938 | SEQ ID NO: 330 |
| XLOC_011790 | linc-CNTNAP4 | 0.322157444 | SEQ ID NO: 331 |
| XLOC_002726 | linc-CHMP2B-1 | 0.322080815 | SEQ ID NO: 332 |
| XLOC_013869 | linc-CXADR-2 | 0.315734934 | SEQ ID NO: 333 |
| XLOC_001575 | linc-LOC285033-5 | 0.314112195 | SEQ ID NO: 334 |
| XLOC_012618 | linc-ARHGAP28-2 | 0.313527431 | SEQ ID NO: 335 |
| XLOC_011592 | linc-RGMA-7 | 0.31075893 | SEQ ID NO: 336 |
| XLOC_008462 | linc-BMS1-3 | 0.310080067 | SEQ ID NO: 337 |
| XLOC_000677 | Iinc-C1orf86 | 0.308767935 | SEQ ID NO: 338 |
| XLOC_001809 | linc-CASP10-1 | 0.305027664 | SEQ ID NO: 339 |
| XLOC_003665 | linc-SYNPO2-2 | 0.304166908 | SEQ ID NO: 340 |
| XLOC_006242 | linc-FAM71F2-1 | 0.302572445 | SEQ ID NO: 341 |
| XLOC_006704 | linc-TNKS-3 | 0.302099578 | SEQ ID NO: 342 |
| XLOC_002353 | linc-MMADHC-3 | 0.301706409 | SEQ ID NO: 343 |
| XLOC_006753 | linc-LEPROTL1-6 | 0.300180236 | SEQ ID NO: 344 |
| XLOC_011480 | linc-BCL2L10 | 0.300133861 | SEQ ID NO: 345 |
| XLOC_010967 | linc-OR5AU1 | 0.299893673 | SEQ ID NO: 346 |
| XLOC_005361 | linc-SH3BGRL2-1 | 0.299587053 | SEQ ID NO: 347 |
| XLOC_002209 | linc-TRIM43B-2 | 0.298151464 | SEQ ID NO: 348 |
| XLOC_007808 | linc-ALG2-5 | 0.29496598 | SEQ ID NO: 349 |
| XLOC_006721 | linc-C8orf79-2 | 0.294495313 | SEQ ID NO: 350 |
| XLOC_013559 | linc-CEBPB-1 | 0.293224 | SEQ ID NO: 351 |
| XLOC_005052 | linc-RPS14 | 0.292874422 | SEQ ID NO: 352 |
| XLOC_008916 | linc-RRP12 | 0.291314841 | SEQ ID NO: 353 |
| XLOC_002048 | linc-FAM98A-3 | 0.290100326 | SEQ ID NO: 354 |
| XLOC_003422 | linc-TACC3 | 0.288364688 | SEQ ID NO: 355 |
| XLOC_012773 | linc-MPPE1-4 | 0.287516341 | SEQ ID NO: 356 |
| XLOC_013631 | linc-IDH3B-1 | 0.286798877 | SEQ ID NO: 357 |
| XLOC_006719 | linc-C8orf79-4 | 0.282627148 | SEQ ID NO: 358 |
| XLOC_006994 | linc-DEFB105B-3 | 0.28231064 | SEQ ID NO: 359 |
| XLOC_005452 | linc-HSF2-1 | 0.281989523 | SEQ ID NO: 360 |
| XLOC_001401 | linc-EPT1 | 0.279663655 | SEQ ID NO: 361 |
| XLOC_010754 | linc-RPGRIP1-3 | 0.274995392 | SEQ ID NO: 362 |
| XLOC_002997 | linc-MUC20-1 | 0.273721122 | SEQ ID NO: 363 |
| XLOC_006507 | linc-MAGI2-3 | 0.273664097 | SEQ ID NO: 364 |
| XLOC_001309 | linc-SNTG2-3 | 0.270862516 | SEQ ID NO: 365 |
| XLOC_006993 | linc-DEFB105B-2 | 0.268784648 | SEQ ID NO: 366 |
| XLOC_005924 | linc-TCP10-4 | 0.265082165 | SEQ ID NO: 367 |
| XLOC_009813 | linc-NAV3-1 | 0.263629068 | SEQ ID NO: 368 |
| XLOC_014111 | linc-CSTB-6 | 0.263146049 | SEQ ID NO: 369 |
| XLOC_008617 | linc-TCF7L2-3 | 0.261553826 | SEQ ID NO: 370 |
| XLOC_012083 | linc-SPNS3 | 0.258809064 | SEQ ID NO: 371 |
| XLOC_011350 | linc-FURIN | 0.258505692 | SEQ ID NO: 372 |
| XLOC_009765 | linc-HNRNPA1-3 | 0.254982021 | SEQ ID NO: 373 |
| XLOC_000746 | linc-C1orf63 | 0.254843625 | SEQ ID NO: 374 |
| XLOC_001415 | linc-SPAST-2 | 0.253244998 | SEQ ID NO: 375 |
| XLOC_007615 | linc-EGFL7-1 | 0.247945267 | SEQ ID NO: 376 |
| XLOC_005939 | linc-THBS2-3 | 0.247150699 | SEQ ID NO: 377 |
| XLOC_007347 | linc-FRMPD1 | 0.244838556 | SEQ ID NO: 378 |
| XLOC_014121 | linc-ITGB2-3 | 0.241913784 | SEQ ID NO: 379 |
| XLOC_011104 | linc-TRIP11 | 0.239932263 | SEQ ID NO: 380 |
| XLOC_004501 | linc-FER-1 | 0.23938625 | SEQ ID NO: 381 |
| XLOC_010263 | linc-TMEM132D-1 | 0.237899784 | SEQ ID NO: 382 |
| XLOC_011081 | linc-C14orf4-2 | 0.237568632 | SEQ ID NO: 383 |
| XLOC_001208 | linc-GPATCH2-9 | 0.2321516 | SEQ ID NO: 384 |
| XLOC_012726 | linc-ZNF236-4 | 0.229945164 | SEQ ID NO: 385 |
| XLOC_000889 | linc-TTLL7-2 | 0.22550242 | SEQ ID NO: 386 |
| XLOC_011193 | linc-APBA2-3 | 0.223522184 | SEQ ID NO: 387 |
| XLOC_008795 | linc-ZNF32-5 | 0.220751156 | SEQ ID NO: 388 |
| XLOC_011388 | linc-ALDH1A3-1 | 0.216685456 | SEQ ID NO: 389 |
| XLOC_000909 | linc-GBP5-2 | 0.214717471 | SEQ ID NO: 390 |
| XLOC_006178 | linc-DYNC1I1-2 | 0.210154936 | SEQ ID NO: 391 |
| XLOC_011368 | linc-NR2F2-3 | 0.209672378 | SEQ ID NO: 392 |
| XLOC_005764 | linc-B3GAT2-4 | 0.208500606 | SEQ ID NO: 393 |
| XLOC_009255 | linc-CEP57-3 | 0.198606717 | SEQ ID NO: 394 |
| XLOC_011880 | linc-CPPED1-3 | 0.197968745 | SEQ ID NO: 395 |
| XLOC_008489 | linc-PHYHIPL | 0.195626262 | SEQ ID NO: 396 |
| XLOC_007438 | linc-C9orf170-1 | 0.187831194 | SEQ ID NO: 397 |
| XLOC_012171 | linc-SPACA3 | 0.184937122 | SEQ ID NO: 398 |
| XLOC_011334 | linc-FAM103A1 | 0.181631176 | SEQ ID NO: 399 |
| XLOC_001640 | linc-INHBB | 0.177266105 | SEQ ID NO: 400 |
| XLOC_007377 | linc-ANKRD20A1-2 | 0.174463897 | SEQ ID NO: 401 |
| XLOC_001061 | linc-CRP | 0.173769194 | SEQ ID NO: 402 |
| XLOC_003449 | linc-CPEB2-16 | 0.17280083 | SEQ ID NO: 403 |
| XLOC_000021 | linc-PLCH2 | 0.16678836 | SEQ ID NO: 404 |
| XLOC_012112 | linc-SHISA6-1 | 0.162855407 | SEQ ID NO: 405 |
| XLOC_003795 | linc-ODZ3-5 | 0.15538216 | SEQ ID NO: 406 |
| XLOC_001035 | linc-C1orf43-2 | 0.155203665 | SEQ ID NO: 407 |
| XLOC_005221 | linc-HIST1H2AI-1 | 0.152407981 | SEQ ID NO: 408 |
| XLOC_008735 | linc-BEND7-1 | 0.150345336 | SEQ ID NO: 409 |
| XLOC_009356 | linc-CTSD-3 | 0.146136121 | SEQ ID NO: 410 |
| XLOC_002035 | linc-RBKS-1 | 0.145821566 | SEQ ID NO: 411 |
| XLOC_000595 | linc-PRSS38 | 0.143439674 | SEQ ID NO: 412 |
| XLOC_002070 | linc-HAAO-6 | 0.14205683 | SEQ ID NO: 413 |
| XLOC_000179 | linc-SLC5A9-4 | 0.141891907 | SEQ ID NO: 414 |
| XLOC_002344 | linc-ZEB2-7 | 0.136925129 | SEQ ID NO: 415 |
| XLOC_007701 | linc-FAM75A6-7 | 0.136246423 | SEQ ID NO: 416 |
| XLOC_010693 | linc-DCT-2 | 0.133372302 | SEQ ID NO: 417 |
| XLOC_002368 | linc-LY75 | 0.131903707 | SEQ ID NO: 418 |
| XLOC_009378 | linc-DKK3-3 | 0.131310221 | SEQ ID NO: 419 |
| XLOC_009361 | linc-TRPM5 | 0.130680254 | SEQ ID NO: 420 |
| XLOC_010336 | linc-USPL1-1 | 0.127297353 | SEQ ID NO: 421 |
| XLOC_010592 | linc-TPT1-2 | 0.115058273 | SEQ ID NO: 422 |
| XLOC_007880 | linc-OBP2B | 0.106853371 | SEQ ID NO: 423 |
| XLOC_004252 | linc-C5orf38-4 | 0.106063415 | SEQ ID NO: 424 |
| XLOC_000682 | linc-MMEL1-3 | 0.105313513 | SEQ ID NO: 425 |
| XLOC_006294 | linc-GALNTL5-3 | 0.10516268 | SEQ ID NO: 426 |
| XLOC_008955 | linc-ZDHHC6-2 | 0.094186466 | SEQ ID NO: 427 |
| XLOC_004250 | linc-C5orf38-5 | 0.092365339 | SEQ ID NO: 428 |
| XLOC_002067 | linc-HAAO-4 | 0.09050779 | SEQ ID NO: 429 |
| XLOC_008151 | linc-CXorf36-3 | 0.088444922 | SEQ ID NO: 430 |
| XLOC_000105 | linc-WDTC1 | 0.088191677 | SEQ ID NO: 431 |
| XLOC_005991 | linc-LOC100129335-2 | 0.080936735 | SEQ ID NO: 432 |
| XLOC_009261 | linc-DYNC2H1-4 | 0.080797382 | SEQ ID NO: 433 |
| XLOC_013305 | linc-PEPD-1 | 0.080031439 | SEQ ID NO: 434 |
| XLOC_005827 | linc-HDDC2-4 | 0.077438115 | SEQ ID NO: 435 |
| XLOC_010593 | linc-TPT1-1 | 0.072867073 | SEQ ID NO: 436 |
| XLOC_013900 | linc-USP16-5 | 0.072684312 | SEQ ID NO: 437 |
| XLOC_014237 | linc-PICK1 | 0.065587113 | SEQ ID NO: 438 |
| XLOC_008224 | linc-RHOXF1-3 | 0.061433191 | SEQ ID NO: 439 |
| XLOC_004800 | linc-OXCT1-1 | 0.060013638 | SEQ ID NO: 440 |
| XLOC_005088 | linc-BOD1-2 | 0.059687797 | SEQ ID NO: 441 |
| XLOC_004598 | linc-ARHGEF37-2 | 0.057257232 | SEQ ID NO: 442 |
| XLOC_004517 | linc-AQPEP | 0.048804254 | SEQ ID NO: 443 |
| XLOC_004090 | linc-PABPC4L-1 | 0.046101682 | SEQ ID NO: 444 |
| XLOC_011816 | linc-MAP1LC3B-5 | 0.044516113 | SEQ ID NO: 445 |
| XLOC_011944 | linc-TOX3-2 | 0.044321378 | SEQ ID NO: 446 |
| XLOC_010826 | linc-FRMD6-2 | 0.039242318 | SEQ ID NO: 447 |
| XLOC_005629 | linc-DEK-6 | 0.030014166 | SEQ ID NO: 448 |
| XLOC_013795 | linc-ZFP64-5 | 0.025959582 | SEQ ID NO: 449 |
| XLOC_000207 | linc-PRKAA2-8 | 0.02425015 | SEQ ID NO: 450 |
| XLOC_012564 | linc-ABCA5-7 | 0.023910303 | SEQ ID NO: 451 |
| XLOC_007725 | linc-PRKACG-2 | 0.0229167 | SEQ ID NO: 452 |

TABLE 4
UPREGULATED IN BREAST TUMORS

| Gene_ID | lincRNA_ID | Fold_Change | SEQ ID NO. |
|---|---|---|---|
| XLOC_001851 | linc-TMEM169-3 | 58.83955766 | SEQ ID NO: 453 |
| XLOC_012538 | linc-HEATR6-2 | 15.36968877 | SEQ ID NO: 454 |
| XLOC_002866 | linc-TM4SF4-2 | 14.32014203 | SEQ ID NO: 455 |
| XLOC_005936 | linc-DACT2-3 | 13.10115726 | SEQ ID NO: 456 |
| XLOC_012925 | linc-SAFB-2 | 9.850864322 | SEQ ID NO: 457 |
| XLOC_013207 | linc-PTPRS-2 | 8.815825271 | SEQ ID NO: 458 |
| XLOC_012193 | linc-ZPBP2 | 5.568541345 | SEQ ID NO: 459 |
| XLOC_002221 | linc-MGAT4A | 5.490873802 | SEQ ID NO: 460 |
| XLOC_007053 | linc-DUSP26-5 | 5.08426453 | SEQ ID NO: 461 |
| XLOC_012057 | linc-CA5A-2 | 4.983267364 | SEQ ID NO: 462 |
| XLOC_001625 | linc-MERTK-2 | 4.380662896 | SEQ ID NO: 463 |
| XLOC_012568 | linc-ABCA5-3 | 4.334677593 | SEQ ID NO: 464 |
| XLOC_000160 | linc-GUCA2B | 4.214663722 | SEQ ID NO: 465 |
| XLOC_001763 | linc-HOXD1 | 4.149028136 | SEQ ID NO: 466 |
| XLOC_010998 | linc-FOXA1-2 | 3.8345659 | SEQ ID NO: 467 |
| XLOC_001257 | linc-EGLN1-2 | 3.760908853 | SEQ ID NO: 468 |
| XLOC_011294 | linc-LRRC49-4 | 3.630447216 | SEQ ID NO: 469 |
| XLOC_001942 | linc-TMEM18-13 | 3.488354904 | SEQ ID NO: 470 |
| XLOC_013301 | linc-ANKRD27 | 3.457454839 | SEQ ID NO: 471 |
| XLOC_012754 | linc-LAMA1-5 | 3.444137534 | SEQ ID NO: 472 |
| XLOC_000527 | linc-TMEM183B-1 | 3.095113275 | SEQ ID NO: 473 |
| XLOC_003932 | linc-UGDH | 3.009349439 | SEQ ID NO: 474 |
| XLOC_011858 | linc-PKMYT1 | 2.948945954 | SEQ ID NO: 475 |
| XLOC_012192 | linc-PPP1R1B | 2.90336726 | SEQ ID NO: 476 |
| XLOC_013534 | linc-WFDC2-2 | 2.851108866 | SEQ ID NO: 477 |
| XLOC_003077 | linc-DYNC1LI1-2 | 2.777741675 | SEQ ID NO: 478 |
| XLOC_010236 | linc-DHX37-22 | 2.764514331 | SEQ ID NO: 479 |
| XLOC_009299 | linc-OAF-6 | 2.718723501 | SEQ ID NO: 480 |
| XLOC_014418 | linc-ODF3B | 2.624478464 | SEQ ID NO: 481 |
| XLOC_012611 | linc-ARHGAP28-9 | 2.361504587 | SEQ ID NO: 482 |
| XLOC_007054 | linc-DUSP26-6 | 2.336774622 | SEQ ID NO: 483 |
| XLOC_002408 | linc-EVX2-8 | 2.277839612 | SEQ ID NO: 484 |
| XLOC_012503 | linc-COPZ2 | 2.21559804 | SEQ ID NO: 485 |
| XLOC_011034 | linc-DLGAP5-1 | 2.188339707 | SEQ ID NO: 486 |
| XLOC_004445 | linc-XRCC4-3 | 2.152494357 | SEQ ID NO: 487 |
| XLOC_010709 | linc-ZIC5 | 2.129794315 | SEQ ID NO: 488 |
| XLOC_008724 | linc-KIN-5 | 2.114328259 | SEQ ID NO: 489 |
| XLOC_012975 | linc-NACC1 | 2.10115787 | SEQ ID NO: 490 |
| XLOC_002133 | linc-SERTAD2-4 | 2.046833149 | SEQ ID NO: 491 |
| XLOC_012342 | linc-ASPSCR1 | 2.022831858 | SEQ ID NO: 492 |
| XLOC_003441 | linc-KIAA0232 | 2.007391308 | SEQ ID NO: 493 |

TABLE 5
DOWNREGULATED IN BOTH
COLON AND BREAST TUMORS

| lincRNA_ID | SEQ ID NO. |
|---|---|
| linc-AP2B1-2 | SEQ ID NO: 494 |
| linc-UTRN | SEQ ID NO: 495 |
| linc-GPR65-6 | SEQ ID NO: 496 |
| linc-EGFL7-1 | SEQ ID NO: 497 |
| linc-ZNF404 | SEQ ID NO: 498 |
| linc-FRG1-5 | SEQ ID NO: 499 |
| linc-BCL2L10 | SEQ ID NO: 500 |
| linc-GIMAP8-1 | SEQ ID NO: 501 |
| linc-MAGI2-3 | SEQ ID NO: 502 |
| linc-DEFB105B-2 | SEQ ID NO: 503 |
| linc-C1orf43-2 | SEQ ID NO: 504 |
| linc-RGMA-7 | SEQ ID NO: 505 |
| linc-SHISA6-1 | SEQ ID NO: 506 |
| linc-SYT4-1 | SEQ ID NO: 507 |
| linc-GRPEL1-1 | SEQ ID NO: 508 |
| linc-ZNF583-1 | SEQ ID NO: 509 |
| linc-ZEB2-7 | SEQ ID NO: 510 |
| linc-GPATCH2-9 | SEQ ID NO: 511 |
| linc-ARHGEF37-2 | SEQ ID NO: 512 |
| linc-GTPBP8 | SEQ ID NO: 513 |

TABLE 6
UPREGULATED IN BOTH COLON AND BREAST TUMORS

| lincRNA_ID | SEQ ID NO. |
|---|---|
| linc-DUSP26-6 | SEQ ID NO: 514 |
| linc-ASPSCR1 | SEQ ID NO: 515 |
| linc-SERTAD2-4 | SEQ ID NO: 516 |
| linc-ARHGAP28-9 | SEQ ID NO: 517 |
| linc-NACC1 | SEQ ID NO: 518 |
| linc-TMEM183B-1 | SEQ ID NO: 519 |
| linc-HOXD1 | SEQ ID NO: 520 |
| linc-OAF-6 | SEQ ID NO: 521 |

[0067] In some embodiments, cancer in a subject can be treated by administering an agent to cancer cells of the subject at an amount effective to modulate the level of DNMT1-associated RNA and/or the interaction of DNMT1-associated RNA and DNMT1 in the cancer cells. In one example, the cancer can be selected from the group consisting of breast cancer and colon cancer. In other embodiments, the DNMT1-associated RNA can be DNMT1-associated long non-coding RNA.

[0068] In some embodiments, the agent administered to the cancer cells can be effective to decrease, reduce or downregulate the level of DNMT1-associated RNA that is over-expressed or upregulated in the cancer cells compared to normal cells. As used herein, the term “downregulate”, or “reduce”, means that the level of DNMT1-associated RNA molecules or equivalent RNA is reduced below that observed in comparative normal cells. The DNMT1-associated RNA is down-regulated when expression of the DNMT1-associated RNA molecules is reduced at least 10%, at least about 20%, at least about 30%, at least about 50%, or at least about 75% relative to a corresponding non-modulated control. Thus, in some embodiments, the agent can be an inhibitor (e.g., antagonist) of DNMT1-associated RNA that is upregulated or over expressed in the cancer cells compared to normal cells.

[0069] In one example, the DNMT-1 associated RNA that is over expressed or upregulated can include at least one of linc-GATA5-1, linc-FAM84B-9, linc-OR10H4, linc-DUSP26-6, linc-CCDC40-1, linc-CSPP1, linc-ASPSCR1, linc-U2AF1-5, linc-BEAN1, linc-EFR3A-7, linc-SLC25A45-5, linc-SEMA3A, linc-CXXC4-1, linc-EFR3A-4, linc-JAKMIP3-3, linc-KIAA1755-4, linc-EPHB4, linc-GAD1-1, linc-IGFBP2-3, linc-CCDC122-4, linc-NADSYN1-2, linc-DUSP26-1, linc-EFR3A-5, linc-TCF20, linc-RSPH1-1, linc-DUXA-2, linc-RTEL1, linc-INO80, linc-UBE3C-2, linc-STIM2-1, linc-VEZF1, linc-GPR183-2, linc-WHAMM-1, linc-FRMPD1, linc-MIB2, linc-SERTAD2-4, linc-HAAO-4, linc-CDH5-3, linc-NDUFAF2-3, linc-PPM1J, linc-LY6H, linc-MKLN1-2, linc-SERPIND1, linc-TCP10-5, linc-PPIAL4F-1, linc-BIRC7-3, linc-S100B-2, linc-C1QTNF9B, linc-PXN, linc-SRL, linc-ZNF692-6, linc-BDH1-3, linc-RALGAPB, linc-MYOD1, linc-OR4F16-9, linc-MUC20-3, linc-BTBD6-1, linc-CDK13-1, linc-ZNF8-2, linc-HIST1H2AI-2, linc-OR7C2-1, linc-MZF1-2, linc-CMPK1-3, linc-ARHGAP28-9, linc-NACC1, linc-BMS1-4, linc-TCP11L2-1, linc-CANX-1, linc-KCTD7-2, linc-TMEM105-2, linc-MRPS31, linc-RGL4-1, linc-METTL14-1, linc-NDUFB4-5, linc-ARF5-2, linc-NBPF15-1, linc-PHF10, linc-NADSYN1-1, linc-TMEM183B-1, linc-CALCOCO2-3, linc-BDH1-2, linc-ADAMTSL4, linc-RPS7-1, linc-ATP6V1C2-4, linc-FSCN2-1, linc-TUBGCP3-2, linc-HOXD1, linc-TGFBRAP1, linc-NOP14-3, linc-IER5L-2, linc-ASPRV1-1, linc-TPT1-2, linc-OAF-6, linc-COX5B-3, linc-ZBED1-4, linc-HIST1H2AI-1, linc-CALCOCO2-2, linc-ARF6-1, linc-MAP7-BP, linc-LOC285033-4, linc-ZNF674, linc-HTR5A-1, linc-GPR179, linc-RPP40, linc-SATB2-2, linc-MUC20-2, linc-ZNF516-4, linc-STX17, linc-CDH6-7, linc-SERHL2-3, or linc-OR4F16-4.

[0070] In another example, the DNMT-1 associated RNA that is over expressed can include at least one of linc-TMEM169-3, linc-HEATR6-2, linc-TM4SF4-2, linc-DACT2-3, linc-SAFB-2, linc-PTPRS-2, linc-ZPBP2, linc-MGAT4A, linc-DUSP26-5, linc-CA5A-2, linc-MERTK-2, linc-ABCA5-3, linc-GUCA2B, linc-HOXD1, linc-FOXA1-2, linc-EGLN1-2, linc-LRRC49-4, linc-TMEM18-13, linc-ANKRD27, linc-LAMA1-5, linc-TMEM183B-1, linc-UGDH, linc-PKMYT1, linc-PPP1R1B, linc-WFDC2-2, linc-DYNC1LI1-2, linc-DHX37-22, linc-OAF-6, linc-ODF3B, linc-ARHGAP28-9, linc-DUSP26-6, linc-EVX2-8, linc-COPZ2, linc-DLGAP5-1, linc-XRCC4-3, linc-ZIC5, linc-KIN-5, linc-NACC1, linc-SERTAD2-4, linc-ASPSCR1, or linc-KIAA0232.

[0071] In yet another example, the DNMT-1 associated RNA can include at least one of linc-DUSP26-6, linc-ASPSCR1, linc-SERTAD2-4, linc-ARHGAP28-9, linc-NACC1, linc-TMEM183B-1, linc-HOXD1, or linc-OAF-6.

[0072] An inhibitor of DNMT1-associated RNA, which is upregulated or over expressed in cancer cells compared to normal cells, can include any agent that inhibits or reduces DNMT1-associated RNA expression or function. Agents that inhibit or reduce DNMT1-associated RNA expression or function can be any type of entity, for example, chemicals, nucleic acid sequences, nucleic acid analogues, proteins, peptides or fragments thereof. In some embodiments, the agent is any chemical, entity or moiety, including without limitation, synthetic and naturally-occurring non-proteinaceous entities. In certain embodiments the agent is a small molecule having a chemical moiety.

[0073] In some embodiments, agents that inhibit or reduce DNMT1-associated RNA expression or function are nucleic acids. Nucleic acid inhibitors of DNMT1-associated RNA expression or function include, for example, RNA interference (RNAi) molecules or constructs, such as siRNA, dsRNA, stRNA, shRNA, microRNA and modified versions thereof, where the RNA interference molecule silences the expression or function of the DNMT1-associated RNA. The RNAi molecule of DNMT1-associated RNA can have nucleic acid sequence that is substantially complementary to a portion of at least one DNMT1-associated RNA that is upregulated in the cancer cells. For example, the RNAi molecule of DNMT1-associated RNA can have nucleic acid sequence that is substantially complementary to a portion of at least one DNMT1-associated RNA, which is listed in Tables 2, 4, and 6.

[0074] In some embodiments single-stranded RNA (ssRNA), a form of RNA endogenously found in eukaryotic cells can be used to form an RNAi molecule. Cellular ssRNA molecules include messenger RNAs (and the progenitor pre-messenger RNAs), small nuclear RNAs, small nucleolar RNAs, transfer RNAs and ribosomal RNAs. Double-stranded RNA (dsRNA) induces a size-dependent immune response such that dsRNA larger than 30 bp activates the interferon response, while shorter dsRNAs feed into the cell's endogenous RNA interference machinery downstream of the Dicer enzyme.

[0075] RNA interference (RNAi) provides a powerful approach for inhibiting the expression of selected target RNAs. RNAi uses small interfering RNA (siRNA) duplexes that target the RNA for selective degradation. siRNA-dependent post-transcriptional silencing of gene expression involves cutting the target messenger RNA molecule at a site guided by the siRNA.

[0076] RNA interference (RNAi) is an evolutionally conserved process whereby the expression or introduction of RNA of a sequence that is identical or highly similar to a target gene results in the sequence specific degradation or specific post-transcriptional gene silencing (PTGS) of messenger RNA (mRNA) transcribed from that targeted gene (see Coburn, G. and Cullen, B. (2002) J. of Virology 76(18):9225), thereby inhibiting expression of the target gene. In one embodiment, the RNA is double stranded RNA (dsRNA). This process has been described in plants, invertebrates, and mammalian cells. In nature, RNAi is initiated by the dsRNA-specific endonuclease Dicer, which promotes processive cleavage of long dsRNA into double-stranded fragments termed siRNAs. siRNAs are incorporated into a protein complex (termed “RNA induced silencing complex,” or “RISC”) that recognizes and cleaves target mRNAs. RNAi can also be initiated by introducing nucleic acid molecules, e.g., synthetic siRNAs or RNA interfering agents, to inhibit or silence the expression of target genes. As used herein, “inhibition of target gene expression” includes any decrease in expression or level of the target gene as compared to a situation wherein no RNA interference has been induced. The decrease can be of at least about 30%, 40%, 50%, 60%, 70%, 80%, 90%, 95% or 99% or more as compared to the expression of a target gene or the activity or level of the protein encoded by a target gene which has not been targeted by an RNA interfering agent.

[0077] “Short interfering RNA” (siRNA), also referred to herein as “small interfering RNA” refers to an agent which functions to inhibit expression of a target gene, e.g., by RNAi. An siRNA can be chemically synthesized, can be produced by in vitro transcription, or can be produced within a host cell. In one embodiment, siRNA is a double stranded RNA (dsRNA) molecule of about 15 to about 40 nucleotides in length, preferably about 15 to about 28 nucleotides, more preferably about 19 to about 25 nucleotides in length, and more preferably about 19, 20, 21, 22, or 23 nucleotides in length, and can contain a 3′ and/or 5′ overhang on each strand having a length of about 0, 1, 2, 3, 4, or 5 nucleotides. The length of the overhang is independent between the two strands, i.e., the length of the overhang on one strand is not dependent on the length of the overhang on the second strand. Preferably the siRNA is capable of promoting RNA interference through degradation or specific post-transcriptional gene silencing (PTGS) of the target messenger RNA (mRNA).

[0078] siRNAs also include small hairpin (also called stem loop) RNAs (shRNAs). In one embodiment, these shRNAs are composed of a short (e.g., about 19 to about 25 nucleotide) antisense strand, followed by a nucleotide loop of about 5 to about 9 nucleotides, and the analogous sense strand. Alternatively, the sense strand can precede the nucleotide loop structure and the antisense strand can follow. These shRNAs can be contained in plasmids, retroviruses, and lentiviruses and expressed from, for example, the pol III U6 promoter, or another promoter (see, e.g., Stewart, et al. (2003) RNA April; 9(4):493-501, incorporated by reference herein in its entirety).

[0079] An siRNA can be substantially homologous to the target gene or genomic sequence, or a fragment thereof. As used in this context, the term “homologous” is defined as being substantially identical, sufficiently complementary, or similar to the target mRNA, or a fragment thereof, to effect RNA interference of the target. In addition to native RNA molecules, RNA suitable for inhibiting or interfering with the expression of a target sequence include RNA derivatives and analogs.

[0080] The siRNA targets only one sequence. Each of the RNA interfering agents, such as siRNAs, can be screened for potential off-target effects by, for example, expression profiling. Such methods are known to one skilled in the art and are described, for example, in Jackson et al, Nature Biotechnology 6:635-637, 2003. In addition to expression profiling, one can also screen the potential target sequences for similar sequences in the sequence databases to identify potential sequences which can have off-target effects. For example, according to Jackson et al. (Id.) 15, or perhaps as few as 11 contiguous nucleotides of sequence identity are sufficient to direct silencing of non-targeted transcripts. Therefore, one can initially screen the proposed siRNAs to avoid potential off-target silencing using the sequence identity analysis by any known sequence comparison methods, such as BLAST.

[0081] siRNA molecules need not be limited to those molecules containing only RNA, but, for example, further encompass chemically modified nucleotides and non-nucleotides, and also include molecules wherein a ribose sugar molecule is substituted for another sugar molecule or a molecule which performs a similar function. Moreover, a non-natural linkage between nucleotide residues can be used, such as a phosphorothioate linkage. For example, siRNA containing D-arabinofuranosyl structures in place of the naturally-occurring D-ribonucleosides found in RNA can be used in RNAi molecules according to the present invention (U.S. Pat. No. 5,177,196).

[0082] The RNA strand can be derivatized with a reactive functional group of a reporter group, such as a fluorophore. Particularly useful derivatives are modified at a terminus or termini of an RNA strand, typically the 3′ terminus of the sense strand. For example, the 2′-hydroxyl at the 3′ terminus can be readily and selectively derivatized with a variety of groups.

[0083] Other useful RNA derivatives incorporate nucleotides having modified carbohydrate moieties. The RNA bases can also be modified. Any modified base useful for inhibiting or interfering with the expression of a target sequence can be used. For example, halogenated bases, such as 5-bromouracil and 5-iodouracil can be incorporated. The bases can also be alkylated, for example, 7-methylguanosine can be incorporated in place of a guanosine residue. Non-natural bases that yield successful inhibition can also be incorporated.

[0084] siRNA and miRNA molecules having various “tails” covalently attached to either their 3′- or to their 5′-ends, or to both, are also known in the art and can be used to stabilize the siRNA and miRNA molecules delivered using the methods of the present invention. Generally speaking, intercalating groups, various kinds of reporter groups and lipophilic groups attached to the 3′ or 5′ ends of the RNA molecules are well known to one skilled in the art and are useful according to the methods of the present invention. Descriptions of syntheses of 3′-cholesterol or 3′-acridine modified oligonucleotides applicable to preparation of modified RNA molecules useful according to the present invention can be found, for example, in the articles: Gamper, H. B., Reed, M. W., Cox, T., Virosco, J. S., Adams, A. D., Gall, A., Scholler, J. K., and Meyer, R. B. (1993) Facile Preparation and Exonuclease Stability of 3′-Modified Oligodeoxynucleotides. Nucleic Acids Res. 21 145-150; and Reed, M. W., Adams, A. D., Nelson, J. S., and Meyer, R. B., Jr. (1991) Acridine and Cholesterol-Derivatized Solid Supports for Improved Synthesis of 3′-Modified Oligonucleotides. Bioconjugate Chem. 2 217-225 (1993).

[0085] Other siRNAs useful for targeting DNMT1-associated RNA expression or function can be readily designed and tested. Accordingly, siRNAs useful for the methods described herein include siRNA molecules of about 15 to about 40 or about 15 to about 28 nucleotides in length. In some embodiments, the DNMT1-associated RNA targeting siRNA molecules can have a length of about 25 to about 29 nucleotides. In other embodiments, the DNMT1-associated RNA targeting siRNA molecules have a length of about 27, 28, 29, or 30 nucleotides. The DNMT1-associated RNA targeting siRNA molecules can also comprise a 3′ hydroxyl group. The DNMT1-associated RNA targeting siRNA molecules can be single-stranded or double stranded; such molecules can be blunt ended or comprise overhanging ends (e.g., 5′, 3′). In specific embodiments, the RNA molecule is double stranded and either blunt ended or comprises overhanging ends.

[0086] In some embodiments, the siRNA or modified siRNA, such as gene silencing RNAi agents, and/or gene activating RNAi agents are delivered in a pharmaceutically acceptable carrier. Additional carrier agents, such as liposomes, can be added to the pharmaceutically acceptable carrier.

[0087] In another embodiment, the siRNA is delivered by delivering a vector encoding small hairpin RNA (shRNA) in a pharmaceutically acceptable carrier to the cells in an organ of an individual. The shRNA is converted by the cells after transcription into siRNA capable of targeting, for example, the DNMT1-associated RNA, to inhibit its function and/or expression. In one embodiment, the vector can be a regulatable vector, such as tetracycline inducible vector.

[0088] In one embodiment, the RNA interfering agents used in the methods described herein are taken up actively by cells in vivo following intravenous injection, e.g., hydrodynamic injection, without the use of a vector, illustrating efficient in vivo delivery of the RNA interfering agents, e.g., the siRNAs used in the methods described herein.

[0089] Other strategies for delivery of the RNA interfering agents, e.g., the siRNAs or shRNAs used in the methods described herein, can also be employed, such as, for example, delivery by a vector, e.g., a plasmid or viral vector, e.g., a lentiviral vector. Such vectors can be used as described, for example, in Xiao-Feng Qin et al. Proc. Natl. Acad. Sci. U.S.A., 100: 183-188. Other delivery methods include delivery of the RNA interfering agents, e.g., the siRNAs or shRNAs, using a basic peptide by conjugating or mixing the RNA interfering agent with a basic peptide, e.g., a fragment of a TAT peptide, mixing with cationic lipids or formulating into particles.

[0090] As noted, the dsRNA, such as siRNA or shRNA can be delivered using an inducible vector, such as a tetracycline inducible vector. Methods described, for example, in Wang et al. Proc. Natl. Acad. Sci. 100: 5103-5106, using pTet-On vectors (BD Biosciences Clontech, Palo Alto, Calif.) can be used. In some embodiments, a vector can be a plasmid vector, a viral vector, or any other suitable vehicle adapted for the insertion and foreign sequence and for the introduction into eukaryotic cells. The vector can be an expression vector capable of directing the transcription of the DNA sequence of the agonist or antagonist nucleic acid molecules into RNA. Viral expression vectors can be selected from a group comprising, for example, reteroviruses, lentiviruses, Epstein Barr virus-, bovine papilloma virus, adenovirus- and adeno-associated-based vectors or hybrid virus of any of the above. In one embodiment, the vector is episomal. The use of a episomal vector provides a means of maintaining the antagonist nucleic acid molecule in the subject in high copy number extra chromosomal DNA thereby eliminating potential effects of chromosomal integration.

[0091] RNA interference molecules and nucleic acid inhibitors used in the methods as disclosed herein can be produced using any known techniques, such as direct chemical synthesis, through processing of longer double stranded RNAs by exposure to recombinant Dicer protein or Drosophila embryo lysates, through an in vitro system derived from S2 cells, using phage RNA polymerase, RNA-dependant RNA polymerase, and DNA based vectors. Use of cell lysates or in vitro processing can further involve the subsequent isolation of the short, for example, about 21-23 nucleotide, siRNAs from the lysate, etc. Chemical synthesis usually proceeds by making two single stranded RNA-oligomers followed by the annealing of the two single stranded oligomers into a double stranded RNA. Other examples include methods disclosed in WO 99/32619 and WO 01/68836 that teach chemical and enzymatic synthesis of siRNA. Moreover, numerous commercial services are available for designing and manufacturing specific siRNAs (see, e.g., QIAGEN Inc., Valencia, Calif. and AMBION Inc., Austin, Tex.)

[0092] In one embodiment, an inhibitor of DNMT1-associated RNA function and/or its expression can be obtained synthetically, for example, by chemically synthesizing a nucleic acid by any method of synthesis known to the skilled artisan. A synthesized nucleic acid inhibitor of DNMT1-associated RNA function and/or its expression can then be purified by any method known in the art. Methods for chemical synthesis of nucleic acids include, but are not limited to, in vitro chemical synthesis using phosphotriester, phosphate or phosphoramidite chemistry and solid phase techniques, or via deoxynucleoside H-phosphonate intermediates (see U.S. Pat. No. 5,705,629 to Bhongle).

[0093] Synthetic siRNA molecules, including shRNA molecules, can also easily be obtained using a number of techniques known to those of skill in the art. For example, the siRNA molecule can be chemically synthesized or recombinantly produced using methods known in the art, such as using appropriately protected ribonucleoside phosphoramidites and a conventional DNA/RNA synthesizer (see, e.g., Elbashir, S. M. et al. (2001) Nature 411:494-498; Elbashir, S. M., W. Lendeckel and T. Tuschl (2001) Genes & Development 15:188-200; Harborth, J. et al. (2001) J. Cell Science 114:4557-4565; Masters, J. R. et al. (2001) Proc. Natl. Acad. Sci., USA 98:8012-8017; and Tuschl, T. et al. (1999) Genes & Development 13:3191-3197). Alternatively, several commercial RNA synthesis suppliers are available including, but are not limited to, Proligo (Hamburg, Germany), Dharmacon Research (Lafayette, Colo., USA), Pierce Chemical (part of Perbio Science, Rockford, Ill., USA), Glen Research (Sterling, Va., USA), ChemGenes (Ashland, Mass., USA), and Cruachem (Glasgow, UK). As such, siRNA molecules are not overly difficult to synthesize and are readily provided in a quality suitable for RNAi. In addition, dsRNAs can be expressed as stem loop structures encoded by plasmid vectors, retroviruses and lentiviruses (Paddison, P. J. et al. (2002) Genes Dev. 16:948-958; McManus, M. T. et al. (2002) RNA 8:842-850; Paul, C. P. et al. (2002) Nat. Biotechnol. 20:505-508; Miyagishi, M. et al. (2002) Nat. Biotechnol. 20:497-500; Sui, G. et al. (2002) Proc. Natl. Acad. Sci., USA 99:5515-5520; Brummelkamp, T. et al. (2002) Cancer Cell 2:243; Lee, N. S., et al. (2002) Nat. Biotechnol. 20:500-505; Yu, J. Y., et al. (2002) Proc. Natl. Acad. Sci., USA 99:6047-6052; Zeng, Y., et al. (2002) Mol. Cell. 9:1327-1333; Rubinson, D. A., et al. (2003) Nat. Genet. 33:401-406; Stewart, S. A., et al. (2003) RNA 9:493-501). These vectors generally have a polIII promoter upstream of the dsRNA and can express sense and antisense RNA strands separately and/or as a hairpin structures. Within cells, Dicer processes the short hairpin RNA (shRNA) into effective siRNA.

[0094] Methods of delivering RNAi agents, e.g., a siRNA, or vectors containing an RNAi agent, to the target cells (e.g., colon cancer cells, breast cancer cells, or other desired target cells) are well known to persons of ordinary skill in the art. In some embodiments, a RNAi agent inhibitor of DNMT1-associated RNA function and/or its expression can be administered to a subject by injection of a composition containing the RNA interfering agent, e.g., an siRNA, or directly contacting the cell with a composition comprising an RNAi agent, e.g., an siRNA. In another embodiment, RNAi agents, e.g., a siRNA can be injected directly into any blood vessel, such as vein, artery, venule or arteriole, via, e.g., hydrodynamic injection or catheterization.

[0095] Administration can be by a single injection or by two or more injections. In some embodiments, a RNAi agent is delivered in a pharmaceutically acceptable carrier. A gene silencing-RNAi agent which inhibits DNMT1-associated RNA function and/or its expression can also be administered in combination with other pharmaceutical agents which are used to treat or prevent cancer.

[0096] In one embodiment, specific cells are targeted with RNA interference, limiting potential side effects of RNA interference caused by non-specific targeting of RNA interference. The method can use, for example, a complex or a fusion molecule comprising a cell targeting moiety and an RNA interference binding moiety that is used to deliver RNAi effectively into cells. In some embodiments, a siRNA or RNAi binding moiety is a protein or a nucleic acid binding domain or fragment of a protein, and the binding moiety is fused to a portion of the targeting moiety. The location of the targeting moiety can be either in the carboxyl-terminal or amino-terminal end of the construct or in the middle of the fusion protein.

[0097] In some embodiments, a viral-mediated delivery mechanism can also be employed to deliver siRNAs, e.g., siRNAs (e.g., gene silencing-RNAi agents) which inhibits DNMT1-associated RNA function and/or its expression to cells in vitro and in vivo as described in Xia, H. et al. (2002) Nat Biotechnol 20(10):1006). Plasmid- or viral-mediated delivery mechanisms of shRNA can also be employed to deliver shRNAs to cells in vitro and in vivo as described in Rubinson, D. A., et al. ((2003) Nat. Genet. 33:401-406) and Stewart, S. A., et al. ((2003) RNA 9:493-501).

[0098] The dose of the particular RNAi agent will be in an amount necessary to effect RNA interference, e.g., gene silencing RNAi which inhibits DNMT1-associated RNA function and/or its expression leading to reduction of DNMT1-associated RNA level.

[0099] In other embodiments, an agent that modulates the level of DNMT1-associated RNA and/or the interaction of DNMT1-associated RNA and DNMT1 in the cancer cells of the subject can be an agent that increases, enhances or upregulates the level of DNMT1-associated RNA, which is under-expressed or downregulated in the cancer cells compared to normal cells. The agent can include, for example, a nucleic acid encoding the under expressed or downregulated DNMT1-associated RNA in the cancer cells.

[0100] In one example, the DNMT1-associated RNA that is under expressed or downregulated in the cancer cells can include at least one of linc-SMAD3 (DACOR1), linc-ANXA8L2-2, linc-TRAK1, linc-AP2B1-2, linc-UTRN, linc-TBX18, linc-GPR65-6, linc-STIL-2, linc-ENPP6-2, linc-GABRA5-6, linc-MRPS18C, linc-EGFL7-1, linc-KLHL31-2, linc-PSMA8-3, linc-ZNF404, linc-HMGB2, linc-OAF-4, linc-FRG1-5, linc-HIST1H3A, linc-TMEM56-3, linc-DBT-3, linc-GNAI1-2, linc-BCL2L10, linc-EPHA6-1, linc-PLDN, linc-GABRA5-5, linc-ACO1-2, linc-NEDD4L-1, linc-MTRNR2L1-2, linc-FAM155B, linc-GIMAP8-1, linc-MAGI2-3, linc-DHX37-17, linc-KLF6-3, linc-RAP1GAP2-1, linc-TMPRSS2-2, linc-C10orf57-3, linc-GPR157-3, linc-LAMA4-2, linc-STIM1, linc-RFC2-2, linc-MRGPRF-1, linc-DEFB105B-2, linc-CTDSP2-1, linc-PRPS1L1, linc-SLC19A1-4, linc-Clorf43-2, linc-COX4NB-8, linc-HES1-3, linc-FIGNL1, linc-OAF-2, linc-COX4NB-9, linc-FBXL5-2, linc-TMEM220-2, linc-KCNMB2-5, linc-KIAA0141, linc-DHX37-19, linc-RGMA-7, linc-ID2-1, linc-SHISA6-1, linc-SYT4-1, linc-TRIML2-5, linc-DHFRL1-4, linc-RGS9-1, linc-ODF2L, linc-SLC22A16, linc-ZPBP2, linc-AGMAT-3, linc-MT1B, linc-GRPEL1-1, linc-PFDN4-2, linc-OPRK1-4, linc-ZNF583-1, linc-PFDN4-3, linc-SAMSN1-3, linc-USP3-1, linc-SHISA6-2, linc-ADAM29-3, linc-ZEB2-7, linc-MLL5, linc-FOXF1-3, linc-BTBD3-3, linc-GPATCH2-9, linc-ARHGEF37-2, linc-KLF6-2, linc-CLMN-1, linc-FOXG1-4, linc-TAAR9-1, linc-GTPBP8, linc-ADAR, linc-SAFB-2, linc-CXorf49B-2, linc-SLCO2A1-1, linc-PTPRS-2, linc-EPCAM, linc-LPHN2-1, linc-AMN1, linc-FAM55D, linc-FAM75A6-4, or linc-PHOX2B-2.

[0101] In another example, the DNMT1-associated RNA that is under expressed in the cancer cells can include at least one of linc-GHRH, linc-VPS36-1, linc-C20orf79, linc-AUTS2-5, linc-ISLR2-3, linc-ZNF692-6, linc-IER3IP1, linc-MANSC1, linc-CXADR-3, linc-ZFHX3-4, linc-ZNF404, linc-FAAH2-2, linc-CLRN2-1, linc-ATP6V1C2-3, linc-METTL14-2, linc-MAP1LC3B-2, linc-TCP11L2-1, linc-GARS-1, linc-NOP14-3, linc-ANKRD55-6, linc-ARFIP1-8, linc-C17orf87, linc-AMAC1, linc-SYT4-1, linc-HTR1D, linc-WNT7B-2, linc-MAP1LC3B2-2, linc-TP53TG3B-6, linc-TMEM105-2, linc-MICB, linc-PLGLB2, linc-OR4F16-9, linc-RBM10, linc-KIAA1712-5, linc-CBLB-6, linc-ATG2B-2, linc-ADI1, linc-SPRY3-1, linc-BEAN1, linc-SHOX-5, linc-WIPF3, linc-SHOX-4, linc-DCAF17-1, linc-TNFRSF14, linc-GPR65-6, linc-PHF10, linc-ZNF692-5, linc-POLR3A-1, linc-LOC389493-2, linc-AP2B1-2, linc-LRRTM3-3, linc-SFMBT1, linc-BTBD6-1, linc-MTHFD2, linc-PRSS42, linc-RGMB-1, linc-ITIH2-10, linc-TPBG-3, linc-TMEM194A, linc-FRG2C-3, linc-ZKSCAN1-1, linc-HEATR2-2, linc-CDK13-1, linc-GIMAP8-1, linc-FAM101A-2, linc-IFITM5, linc-LRRTM3-2, linc-METTL14-1, linc-GTPBP8, linc-KLF13-1, linc-SLC5A3-2, linc-BET3L, linc-TUBGCP3-2, linc-CDH1, linc-PTGR2, linc-CDK17-4, linc-COGS-3, linc-CBR1-1, linc-CCR8-3, linc-LOC150786, linc-FRG1-5, linc-GABRA5-7, linc-DYDC1-5, linc-CREB1-1, linc-LEPROTL1-7, linc-C6orf145-3, linc-HIST1H2AG-4, linc-THSD4, linc-HS3ST3A1-1, linc-KLRC1, linc-ZNF583-1, linc-ZNF253-2, linc-UTRN, linc-ATP6V1C2-4, linc-GRPEL1-1, linc-TTC7A-2, linc-COGS-1, linc-IFLTD1, linc-GALNTL5-1, linc-PCM1, linc-ISLR2-2, linc-DHCR7-2, linc-HES5-2, linc-USP8, linc-VPS8-2, linc-RGL4-1, linc-CEBPG, linc-CRH-2, linc-DR1, linc-UBQLN2, linc-MTRNR2L9-3, linc-ID2-3, linc-TMED5, linc-RAB23-4, linc-NDFIP2-1, linc-ARHGAP5, linc-WRNIP1-2, linc-ANKRD20A1-14, linc-TLN2-1, linc-VPS8-3, linc-CNTNAP4, linc-CHMP2B-1, linc-CXADR-2, linc-LOC285033-5, linc-ARHGAP28-2, linc-RGMA-7, linc-BMS1-3, linc-Clorf86, linc-CASP10-1, linc-SYNPO2-2, linc-FAM71F2-1, linc-TNKS-3, linc-MMADHC-3, linc-LEPROTL1-6, linc-BCL2L10, linc-OR5AU1, linc-SH3BGRL2-1, linc-TRIM43B-2, linc-ALG2-5, linc-C8orf79-2, linc-CEBPB-1, linc-RPS14, linc-RRP12, linc-FAM98A-3, linc-TACC3, linc-MPPE1-4, linc-IDH3B-1, linc-C8orf79-4, linc-DEFB105B-3, linc-HSF2-1, linc-EPT1, linc-RPGRIP1-3, linc-MUC20-1, linc-MAGI2-3, linc-SNTG2-3, linc-DEFB105B-2, linc-TCP10-4, linc-NAV3-1, linc-CSTB-6, linc-TCF7L2-3, linc-SPNS3, linc-FURIN, linc-HNRNPA1-3, linc-C1orf63, linc-SPAST-2, linc-EGFL7-1, linc-THBS2-3, linc-FRMPD1, linc-ITGB2-3, linc-TRIP11, linc-FER-1, linc-TMEM132D-1, linc-C14orf4-2, linc-GPATCH2-9, linc-ZNF236-4, linc-TTLL7-2, linc-APBA2-3, linc-ZNF32-5, linc-ALDH1A3-1, linc-GBP5-2, linc-DYNC1I1-2, linc-NR2F2-3, linc-B3GAT2-4, linc-CEP57-3, linc-CPPED1-3, linc-PHYHIPL, linc-C9orf170-1, linc-SPACA3, linc-FAM103A1, linc-INHBB, linc-ANKRD20A1-2, linc-CRP, linc-CPEB2-16, linc-PLCH2, linc-SHISA6-1, linc-ODZ3-5, linc-Clorf43-2, linc-HIST1H2AI-1, linc-BEND7-1, linc-CTSD-3, linc-RBKS-1, linc-PRSS38, linc-HAAO-6, linc-SLC5A9-4, linc-ZEB2-7, linc-FAM75A6-7, linc-DCT-2, linc-LY75, linc-DKK3-3, linc-TRPM5, linc-USPL1-1, linc-TPT1-2, linc-OBP2B, linc-C5orf38-4, linc-MMEL1-3, linc-GALNTL5-3, linc-ZDHHC6-2, linc-C5orf38-5, linc-HAAO-4, linc-CXorf36-3, linc-WDTC1, linc-LOC100129335-2, linc-DYNC2H1-4, linc-PEPD-1, linc-HDDC2-4, linc-TPT1-1, linc-USP16-5, linc-PICK1, linc-RHOXF1-3, linc-OXCT1-1, linc-BOD1-2, linc-ARHGEF37-2, linc-AQPEP, linc-PABPC4L-1, linc-MAP1LC3B-5, linc-TOX3-2, linc-FRMD6-2, linc-DEK-6, linc-ZFP64-5, linc-PRKAA2-8, linc-ABCA5-7, or linc-PRKACG-2.

[0102] In yet another example, the DNMT1-associated RNA that is under expressed in the cancer cells can include at least one of linc-AP2B1-2, linc-UTRN, linc-GPR65-6, linc-EGFL7-1, linc-ZNF404, linc-FRG1-5, linc-BCL2L10, linc-GIMAP8-1, linc-MAGI2-3, linc-DEFB105B-2, linc-C1orf43-2, linc-RGMA-7, linc-SHISA6-1, linc-SYT4-1, linc-GRPEL1-1, linc-ZNF583-1, linc-ZEB2-7, linc-GPATCH2-9, linc-ARHGEF37-2, linc-GTPBP8, and combinations thereof.

[0103] In some embodiments, a nucleic acid encoding the DNMT1-associated RNA can be substantially homologous or have a sequence identity that is substantially identical to native (or nonmutated) DNMT1-associated RNA such that when the nucleic acid encoding the DNMT1-associated RNA is administered to cancer cells of the subject, cancer growth, proliferation and/or metastasis is inhibited or reduced. By substantially homologous, it is meant the DNMT1-associated RNA has an at least about 80%, about 90%, about 95%, about 96%, about 97%, about 98%, about 99% or about 100% sequence identity with the nucleotide sequence of the native (or nonmutated) DNMT1-associated RNA.

[0104] In some embodiments, a nucleic acid encoding the downregulated DNMT1-associated RNA can have a nucleic acid sequence substantially homologous to the DNMT1-associated RNA or corresponding nucleic acid sequence listed in Tables 1, 3, and 5. For example, the nucleic acid can have a nucleic acid sequence substantially homologous to the nucleic acid sequence of linc-SMAD3. The nucleic encoding the DNMT1-associated RNA can be administered to cells through gene therapy using, for example, a nucleic acid construct. In general, there are two approaches to gene therapy in humans. For in vivo gene therapy, a nucleic acid construct encoding the nucleic acid or polynucleotide of interest can be administered directly to the subject or cells. Alternatively, in ex vivo gene therapy, cells are removed from the subject and treated with a nucleic acid construct to express the gene of interest. In the ex vivo method of gene therapy, the treated cells are then re-administered to the patient.

[0105] Numerous different methods for gene therapy are well known in the art. These methods include, but are not limited to, the use of nucleic acid constructs provided in DNA plasmid vectors as well as DNA and RNA viral vectors. These vectors are engineered to express DNMT1-associated RNA when integrated into patient cells.

[0106] Additionally, nucleic acid constructs for use in methods described herein may have expression signals, such as a strong promoter, a strong termination codon, adjustment of the distance between the promoter and the cloned gene, and the insertion of a transcription termination sequence.

[0107] In certain aspects, the nucleic acid construct includes a nucleic acid substantially homologous to DNMT1-associated RNA operably linked to a promoter to facilitate DNMT1-associated RNA expression within a cancer cell. The promoter may be a strong, viral promoter that functions in eukaryotic cells such as a promoter derived from cytomegalovirus (CMV), simian virus 40 (SV40), mouse mammary tumor virus (MMTV), Rous sarcoma virus (RSV), or adenovirus.

[0108] Alternatively, the promoter used may be tissue-specific, cell type-specific promoter, or a strong general eukaryotic promoter, such as the actin gene promoter. In another aspect, the promoter is a regulated promoter, such as a tetracycline-regulated promoter, expression from which can be regulated by exposure to an exogenous substance (e.g., tetracycline).

[0109] Introduction of one or more of the nucleic acid construct(s) including a nucleic acid encoding a DNMT1-associated RNA can be achieved using a variety of gene transfer protocols permitting transfection of the nucleic acid construct into the cells. Genetic change can be accomplished either by incorporation of the new nucleic acid into the genome of the host cell, or by transient or stable maintenance of the new DNA as an episomal element. A cell has been “transfected” when the nucleic acid construct has been introduced inside the cell membrane using any technology used to introduce nucleic acid molecules into cells.

[0110] A number of transfection techniques are well known in the art and are disclosed herein. See, for example, Graham et al., Virology, 52: 456 (1973); Sambrook et al., Molecular Cloning, a laboratory Manual, Cold Spring Harbor Laboratories (New York, 1989); Davis et al., Basic Methods in Molecular Biology, Elsevier, 1986; and Chu et al., Gene, 13: 197 (1981). Such techniques can be used to introduce one or more nucleic acid constructs described herein into the cells.

[0111] In some aspects, the nucleic acid construct can be introduced into cancer cells using a viral vector. The precise vector and vector formulation used will depend upon several factors, such as the size of the nucleic acid construct to be transferred and the delivery protocol to be used. The nucleic acid construct can also be introduced as infectious particles, e.g., DNA-ligand conjugates, calcium phosphate precipitates, and liposomes.

[0112] In general, viral vectors used are composed of a viral particle derived from a naturally occurring virus, which has been genetically altered to render the virus replication-defective and to deliver a recombinant gene of interest for expression in a target cell. Numerous viral vectors are well known in the art, including, for example, retrovirus, lentivirus, adenovirus, adeno-associated virus, herpes simplex virus (HSV), cytomegalovirus (CMV), vaccinia and poliovirus vectors. The viral vector may be selected according to its preferential infection of the cells targeted.

[0113] Where a replication-deficient virus is used as the viral vector, the production of infectious virus particles containing either DNA or RNA corresponding to the nucleic acid construct can be achieved by introducing the viral construct into a recombinant cell line, which provides the missing components essential for viral replication. Transformation of the recombinant cell line with the recombinant viral vector will not result in production or substantial production of replication-competent viruses, e.g., by homologous recombination of the viral sequences of the recombinant cell line into the introduced viral vector. Methods for production of replication-deficient viral particles containing a nucleic acid of interest are well known in the art and are described in, for example, Rosenfeld et al., Science 252:431-434, 1991 and Rosenfeld et al., Cell 68:143-155, 1992 (adenovirus); U.S. Pat. No. 5,139,941 (adeno-associated virus); U.S. Pat. No. 4,861,719 (retrovirus); and U.S. Pat. No. 5,356,806 (vaccinia virus).

[0114] In other embodiments, the nucleic acid construct including a nucleic acid encoding a DNMT1-associated RNA may be introduced into a cell using a non-viral vector. “Non-viral vector” as used herein is meant to include naked RNA (e.g., RNA not contained within a viral particle, and free of a carrier molecules such as lipids), chemical formulations comprising naked nucleic acid (e.g., a formulation of RNA (and/or DNA) and cationic compounds (e.g., dextran sulfate, cationic lipids)), and naked nucleic acid mixed with an adjuvant, such as a viral particle (e.g., the DNA or RNA of interest is not contained within the viral particle, but the formulation is composed of both naked DNA and viral particles (e.g., adenovirus particles) (see, e.g., Curiel et al. 1992 Am. J. Respir. Cell Mol. Biol. 6:247-52). Thus, “non-viral vector” can include vectors composed of nucleic acid plus viral particles where the viral particles do not contain the nucleic acid construct within the viral genome.

[0115] In some aspects, a liposome non-viral vector can be used to introduce the nucleic acid encoding the DNMT1-associated RNA into the cell. Liposomes for use in the method described herein can include a mixture of lipids, which bind to the nucleic acid construct and facilitate delivery of the construct into the cell. Examples of liposomes that can be used include DOPE (dioleyl phosphatidyl ethanol amine), CUDMEDA (N-(5-cholestrum-3-β-ol 3-urethanyl)-N1,N1-dimethylethylene diamine).

[0116] The nucleic acid encoding the DNMT1-associated RNA or vector thereof can be incorporated into pharmaceutical compositions suitable for administration to a subject. In some particular embodiments, the pharmaceutical composition comprises the vectors described herein and a pharmaceutically acceptable carrier. As used herein, “pharmaceutically acceptable carrier” includes any and all solvents, dispersion media, coatings, antibacterial and antifungal agents, isotonic and absorption delaying agents, and the like that are physiologically compatible. Examples of pharmaceutically acceptable carriers include one or more of water, saline, phosphate buffered saline, dextrose, glycerol, ethanol and the like, as well as combinations thereof. In many cases, it can be preferable to include isotonic agents, for example, sugars, polyalcohols such as mannitol, sorbitol, or sodium chloride in the composition. Pharmaceutically acceptable carriers can further comprise minor amounts of auxiliary substances, such as wetting or emulsifying agents, preservatives or buffers, which enhance the shelf life or effectiveness of the vector or pharmaceutical composition.

[0117] The compositions described herein may be in a variety of forms. These include, for example, liquid, semi-solid and solid dosage forms, such as liquid solutions (e.g., injectable and infusible solutions), dispersions or suspensions, tablets, pills, powders, liposomes and suppositories. The form used depends on the intended mode of administration and therapeutic application. Typical compositions are in the form of injectable or infusible solutions.

[0118] Therapeutic compositions typically must be sterile and stable under the conditions of manufacture and storage. The composition can be formulated as a solution, microemulsion, dispersion, liposome, or other ordered structure suitable to high drug concentration. Sterile injectable solutions can be prepared by incorporating the vector in the required amount in an appropriate solvent with one or a combination of ingredients enumerated above, as required, followed by filtered sterilization.

[0119] Generally, dispersions are prepared by incorporating the vector into a sterile vehicle that contains a basic dispersion medium and the required other ingredients from those enumerated above. In the case of sterile lyophilized powders for the preparation of sterile injectable solutions, the methods of preparation can include vacuum drying and spray-drying that yields a powder of the active ingredient plus any additional desired ingredient from a previously sterile-filtered solution thereof. The proper fluidity of a solution can be maintained, for example, by the use of a coating, such as lecithin, by the maintenance of the required particle size in the case of dispersion and by the use of surfactants. Prolonged absorption of injectable compositions can be achieved by including an agent in the composition that delays absorption, for example, monostearate salts and gelatin.

[0120] The vectors described herein can be administered by a variety of methods known in the art. As will be appreciated by the skilled artisan, the route and/or mode of administration will vary depending upon the desired results. In certain embodiments, the vector may be prepared with a carrier that will protect the vector against rapid release, such as a controlled release formulation, including implants, and microencapsulated delivery systems. Biodegradable, biocompatible polymers can be used, such as ethylene vinyl acetate, polyanhydrides, polyglycolic acid, collagen, polyorthoesters, and polylactic acid. Many methods for the preparation of such formulations are generally known to those skilled in the art.

[0121] In some embodiments, one or more agents that decrease the level of DNMT1-associated RNA that is upregulated in the cancer cells and/or agents that increase the level of DNMT1-associated RNA that is downregulated in the cancer cells can be administered to cancer cells of the subject at an amount effective to modulate the level of DNMT1-associated RNA and/or the interaction of DNMT1-associated RNA and DNMT1 in the cancer cells of the subject and treat cancer. The cancer can be, for example, breast cancer, such as metastatic breast cancer. In some embodiments, the breast cancer is primary breast cancer. In other embodiments, the cancer is prostate cancer, or colon cancer, or hepatocellular carcinoma.

[0122] It will be appreciated that the one or more agents that decrease the level of DNMT1-associated RNA that is upregulated in the cancer cells and/or agents that increase the level of DNMT1-associated RNA that is downregulated in the cancer cells can be used to treat other cancers, such as, small or non-small cell lung, oat cell, papillary, bronchiolar, squamous cell, transitional cell, Walker), leukemia (e.g., B-cell, T-cell, HTLV, acute or chronic lymphocytic, mast cell, myeloid), histiocytoma, histiocytosis, Hodgkin disease, non-Hodgkin lymphoma, plasmacytoma, reticuloendotheliosis, adenoma, adenocarcinoma, adeno-fibroma, adenolymphoma, ameloblastoma, angiokeratoma, angiolymphoid hyperplasia with eosinophilia, sclerosing angioma, angiomatosis, apudoma, branchioma, malignant carcinoid syndrome, carcinoid heart disease, carcinosarcoma, colon cancer, prostate cancer, cementoma, cholan-gioma, cholesteatoma, chondrosarcoma, chondroblastoma, chondrosarcoma, chordoma, choristoma, craniopharyngioma, chrondroma, cylindroma, cystadenocar-cinoma, cystadenoma, cystosarcoma phyllodes, dysgerminoma, ependymoma, Ewing sarcoma, fibroma, fibrosarcoma, giant cell tumor, ganglioneuroma, glioblastoma, glomangioma, granulosa cell tumor, gynandroblastoma, hamartoma, hemangioendo-thelioma, hemangioma, hemangiopericytoma, hemangiosarcoma, hepatoma, hepatocellular cancer, islet cell tumor, Kaposi sarcoma, leiomyoma, leiomyosarcoma, leukosarcoma, Leydig cell tumor, lipoma, liposarcoma, lymphangioma, lymphangiomyoma, lymphangiosarcoma, medulloblastoma, meningioma, mesenchymoma, mesonephroma, mesothelioma, myoblastoma, myoma, myosarcoma, myxoma, myxosarcoma, neurilemmoma, neuroma, neuro-blastoma, neuroepithelioma, neurofibroma, neurofibromatosis, odontoma, osteoma, osteosarcoma, papilloma, paraganglioma, paraganglioma nonchromaffin, pinealoma, rhabdomyoma, rhabdomyosarcoma, Sertoli cell tumor, teratoma, cell tumors, and other diseases in which cells have become dysplastic, immortalized, or transformed.

[0123] Other embodiments described herein relate to compositions and methods for measuring the levels of DNMT1-associated RNA described herein to analyze tissue of a subject having or suspected of having cancer, predict whether a subject has cancer or an increased risk of cancer, determine cancer prognosis in a subject, and/or monitor a subject's response to a treatment regimen for cancer. For example, a biological sample (e.g., a tumor sample) can be obtained from a subject and the level of at least one DNMT1-associated RNA selected from Tables 1, 2, 3, 4, 5, and 6 can be determined or measured from the sample of tissue to generate a DNMT1-associated RNA expression profile. The expression profile from the sample is then compared to an expression profile of a control or standard. A decrease in the expression of the at least one DNMT1-associated RNA selected from Table 1, 3, or 5 and/or increase in the expression of the at least one DNMT1-associated RNA selected from Table 2, 4, or 6 is indicative of the subject having cancer or an increased risk of cancer.

[0124] Measuring methods include any method of nucleic acid detection, for example in situ hybridization for DNMT1-associated RNA using antisense DNA or RNA oligonucleotide probes, ultra-high throughput sequencing, Nanostring technology, microarrays, rolling circle amplification, proximity-mediated ligation, PCR, qRT-PCR ChIP, ChIP-qPCR or antibodies, or protein or nucleic acid measurements. Comparatively high levels of DNMT1-associated RNA compared to control levels in normal cells can indicate metastasis or poor cancer prognosis. Similarly, comparatively low levels of DNMT1-associated RNA compared to control levels in normal cells may indicate cancer progression.

[0125] Information on levels of a given set of DNMT1-associated RNA obtained using biological samples from individuals afflicted with or at risk of cancer may be grouped to form an expression profile map. The expression profile map can result from the study of a large number of individuals with the same cancer or cancer sub-type. In certain embodiments, a cancer expression profile map is established using samples from individuals with matched age, sex, and body index. Each expression profile map provides a template for comparison to DNMT1-associated RNA expression patterns generated from unknown biological samples. DNMT1-associated RNA expression profile maps may be presented as a graphical representation (e.g., on paper or a computer screen), a physical representation (e.g., a gel or array) or a digital representation stored in a computer-readable medium.

[0126] As will be appreciated by those of ordinary skill in the art, sets of biomarkers whose expression profiles correlate with cancer may be used to identify, study, or characterize unknown biological samples. Accordingly, in one aspect, methods for characterizing or analyzing biological samples obtained from a subject suspected of having cancer, for diagnosing cancer in a subject, and for assessing the responsiveness of cancer in a subject to treatment are contemplated. In such methods the DNMT1-associated RNA expression levels determined for a biological sample, obtained from the subject, are compared to the levels in one or more control samples. The control samples may be obtained from a healthy individual (or a group of healthy individuals), and/or from an individual (or group of individuals) afflicted with cancer. As mentioned above, the control expression levels of the DNMT1-associated RNA of interest are preferably determined from a significant number of individuals, and an average or mean is obtained. In certain aspects, the levels determined for the biological sample under investigation are compared to at least one expression profile map for cancer, as described above.

[0127] The methods described herein may be applied to the study of any type of biological samples allowing one or more inventive DNMT1-associated RNA to be assayed. Examples of biological samples include, but are not limited to, blood, blood products (e.g., blood plasma), and tissue. In a particular aspect of the present invention, the biological sample is tissue or biopsy obtained from the subject.

[0128] The biological samples used in the practice of the inventive methods may be fresh or frozen samples collected from a subject, or archival samples with known diagnosis, treatment and/or outcome history. Biological samples may be collected by any non-invasive means. Preferably, there is enough of the biological sample to accurately and reliably determine the abundance of the set of DNMT1-associated RNA of interest. Multiple biological samples may be taken from the subject in order to obtain a representative sampling from the subject.

[0129] In some embodiments, the DNMT1-associated RNA are extracted from the biological sample before analysis. Methods of RNA extraction are well known in the art (see, for example, J. Sambrook et al., “Molecular Cloning: A Laboratory Manual”, 1989, 2nd Ed., Cold Spring Harbor Laboratory Press: Cold Spring Harbor, N.Y.). Most methods of RNA isolation from bodily fluids or tissues are based on the disruption of the tissue in the presence of protein denaturants to quickly and effectively inactivate RNAses. Isolated total RNA may then be further purified from the protein contaminants and concentrated by selective ethanol precipitations, phenol/chloroform extractions followed by isopropanol precipitation or cesium chloride, lithium chloride or cesium trifluoroacetate gradient centrifugations. Kits are also available to extract RNA (i.e., total RNA or mRNA) from bodily fluids or tissues and are commercially available from, for example, Ambion, Inc. (Austin, Tex.), Amersham Biosciences (Piscataway, N.J.), BD Biosciences Clontech (Palo Alto, Calif.), BioRad Laboratories (Hercules, Calif.), GIBCO BRL (Gaithersburg, Md.), and Qiagen, Inc. (Valencia, Calif.).

[0130] In certain aspects, after extraction, lncRNA, lincRNA, or mRNA is amplified, and transcribed into cDNA, which can then serve as template for multiple rounds of transcription by the appropriate RNA polymerase. Amplification methods are well known in the art (see, for example, A. R. Kimmel and S. L. Berger, Methods Enzymol. 1987, 152: 307-316; J. Sambrook et al., “Molecular Cloning: A Laboratory Manual”, 1989, 2nd Ed., Cold Spring Harbour Laboratory Press: New York; “Short Protocols in Molecular Biology”, F. M. Ausubel (Ed.), 2002, 5th Ed., John Wiley & Sons; U.S. Pat. Nos. 4,683,195; 4,683,202 and 4,800,159). Reverse transcription reactions may be carried out using non-specific primers, such as an anchored oligo-dT primer, or random sequence primers, or using a target-specific primer complementary to the RNA for each probe being monitored, or using thermostable DNApolymerases (such as avian myeloblastosis virus reverse transcriptase or Moloney murine leukemia virus reverse transcriptase).

[0131] The diagnostic methods described herein generally involve the determination of the abundance levels of a plurality (i.e., one or more, e.g., at least 2, at least 3, at least 4, at least 5, at least 6, at least 7, at least 8, at least 9, at least 10 or more) of DNMT1-associated RNA in a biological sample obtained from a subject.

[0132] It will be appreciated that the diagnostic methods may involve determination of the expression levels of a set of DNMT1-associated RNA using any suitable method, including, but not limited to, polymerase chain reaction (PCR) (see, for example, U.S. Pat. Nos. 4,683,195; 4,683,202, and 6,040,166; “PCR Protocols: A Guide to Methods and Applications”, Innis et al. (Eds.), 1990, Academic Press: New York), reverse transcriptase PCR(RT-PCT), anchored PCR, competitive PCR (see, for example, U.S. Pat. No. 5,747,251), rapid amplification of cDNA ends (RACE) (see, for example, “Gene Cloning and Analysis: Current Innovations, 1997, pp. 99-115); ligase chain reaction (LCR) (see, for example, EP 01 320308), one-sided PCR (Ohara et al., Proc. Natl. Acad. Sci., 1989, 86: 5673-5677), in situ hybridization, Taqman based assays (Holland et al., Proc. Natl. Acad. Sci., 1991, 88:7276-7280), differential display (see, for example, Liang et al., Nucl. Acid. Res., 1993, 21: 3269-3275) and other RNA fingerprinting techniques, nucleic acid sequence based amplification (NASBA) and other transcription based amplification systems (see, for example, U.S. Pat. Nos. 5,409,818 and 5,554,527), Qbeta Replicase, Strand Displacement Amplification (SDA), Repair Chain Reaction (RCR), nuclease protection assays, subtraction-based methods, Rapid-Scan™, and the like.

[0133] Nucleic acid probes for use in the detection of DNMT1-associated RNA in biological samples may be constructed using conventional methods known in the art. Suitable probes may be based on nucleic acid sequences encoding at least 5 sequential amino acids from regions of nucleic acids encoding a protein marker, and preferably comprise about 15 to about 50 nucleotides. A nucleic acid probe may be labeled with a detectable moiety, as mentioned above in the case of binding agents. The association between the nucleic acid probe and detectable moiety can be covalent or non-covalent. Detectable moieties can be attached directly to nucleic acid probes or indirectly through a linker (E. S. Mansfield et al., Mol. Cell. Probes, 1995, 9: 145-156). Methods for labeling nucleic acid molecules are well-known in the art (for a review of labeling protocols, label detection techniques and recent developments in the field, see, for example, L. J. Kricka, Ann. Clin. Biochem. 2002, 39: 114-129; R. P. van Gijlswijk et al., Expert Rev. Mol. Diagn. 2001, 1: 81-91; and S. Joos et al., J. Biotechnol. 1994, 35:135-153).

[0134] Nucleic acid probes may be used in hybridization techniques to detect DNMT1-associated RNA. The technique generally involves contacting an incubating nucleic acid molecules in a biological sample obtained from a subject with the nucleic acid probes under conditions such that specific hybridization takes place between the nucleic acid probes and the complementary sequences in the nucleic acid molecules. After incubation, the non-hybridized nucleic acids are removed, and the presence and amount of nucleic acids that have hybridized to the probes are detected and quantified.

[0135] Detection of DNMT1-associated RNA may involve amplification of specific polynucleotide sequences using an amplification method such as PCR, followed by analysis of the amplified molecules using techniques known in the art. Suitable primers can be routinely designed by one skilled in the art. In order to maximize hybridization under assay conditions, primers and probes employed in the methods of the invention generally have at least 60%, preferably at least 75% and more preferably at least 90% identity to a portion of nucleic acids encoding a protein marker.

[0136] Hybridization and amplification techniques described herein may be used to assay qualitative and quantitative aspects of expression of nucleic acid molecules comprising polynucleotide sequences coding for the inventive protein markers.

[0137] Alternatively, oligonucleotides or longer fragments derived from DNMT1-associated RNA may be used as targets in a microarray. A number of different array configurations and methods of their production are known to those skilled in the art (see, for example, U.S. Pat. Nos. 5,445,934; 5,532,128; 5,556,752; 5,242,974; 5,384, 261; 5,405,783; 5,412,087; 5,424,186; 5,429,807; 5,436,327; 5,472,672; 5,527,681; 5,529,756; 5,545,531; 5,554, 501; 5,561,071; 5,571,639; 5,593,839; 5,599,695; 5,624,711; 5,658,734; and 5,700,637). Microarray technology allows for the measurement of the steady-state level of large numbers of polynucleotide sequences simultaneously. Microarrays currently in wide use include cDNA arrays and oligonucleotide arrays. Analyses using microarrays are generally based on measurements of the intensity of the signal received from a labeled probe used to detect a cDNA sequence from the sample that hybridizes to a nucleic acid probe immobilized at a known location on the microarray (see, for example, U.S. Pat. Nos. 6,004,755; 6,218,114; 6,218,122; and 6,271,002). Array-based gene expression methods are known in the art and have been described in numerous scientific publications as well as in patents (see, for example, M. Schena et al., Science, 1995, 270: 467-470; M. Schena et al., Proc. Natl. Acad. Sci. USA 1996, 93: 10614-10619; Chen et al., Genomics, 1998, 51: 313324; U.S. Pat. Nos. 5,143,854; 5,445,934; 5,807,522; 5,837, 832; 6,040,138; 6,045,996; 6,284,460; and 6,607,885).

[0138] Once the levels of the DNMT1-associated RNA of interest have been determined for the biological sample being analyzed, they are compared to the levels in one or more control samples or to at least one expression profile map for cancer described herein. Comparison of levels according to methods of the present invention is preferably performed after the levels obtained have been corrected for both differences in the amount of sample assayed and variability in the quality of the sample used. Correction may be carried out by normalizing the levels against reference genes (e.g., housekeeping genes) in the same sample. Alternatively or additionally, normalization can be based on the mean or median signal (e.g., Ct in the case of RT-PCR) of all assayed genes or a large subset thereof (global normalization approach).

[0139] For a given set of DNMT1-associated RNA, comparison of an expression pattern obtained for a biological sample against an expression profile map established for cancer may comprise comparison of the normalized levels on a biomarker-by-biomarker (DNMT1-associated RNA-by-DNMT1-associated RNA) basis and/or comparison of ratios of levels within the set of biomarkers.

[0140] Using methods described herein, skilled physicians may select and prescribe treatments adapted to each individual subject based on the diagnosis of a cancer provided to the subject through determination of the levels of the inventive DNMT1-associated RNA. In particular, the present invention provides physicians with a non-subjective means to diagnose cancer, which will allow for early treatment, when intervention is likely to have its greatest effect. Selection of an appropriate therapeutic regimen for a given patient may be made based solely on the diagnosis provided by the inventive methods. Alternatively, the physician may also consider other clinical or pathological parameters used in existing methods to diagnose cancer and assess its advancement.

[0141] In certain embodiments, the assays, methods and systems described herein relate to identifying a subject with cancer or a need for treatment for cancer. Certain embodiments are related to assays, methods and systems for identifying the severity of cancer in a sample, e.g., a biopsy sample, obtained from a subject. In some embodiments, where the level of DNMT1-associated RNA in the biological sample is at least about 2-fold, at least about 4-fold, at least about 8-fold, or at least about 10-fold increased (e.g., DNMT1-associated RNA of Table 2, 4, or 6) as compared to a reference DNMT1-associated RNA level, the subject is identified as likely to have cancer, and/or metastatic cancer. In other embodiments, where the level of DNMT1-associated RNA in the biological sample is at least about 2-fold, at least about 4-fold, at least about 8-fold, or at least about 10-fold decreased (e.g., DNMT1-associated RNA of Table 1, 3, or 5) as compared to a reference DNMT1-associated RNA level, the subject is identified as likely to have cancer, and/or metastatic cancer. In such instances, a subject identified as likely to have cancer, and/or metastatic cancer can be treated with a more aggressive anti-cancer treatment regimen.

[0142] In some embodiments, where the level of DNMT1-associated RNA in the biological sample is at least about 2-fold, at least about 4-fold, at least about 8-fold, or at least about 10-fold increased (e.g., DNMT1-associated RNA of Table 2, 4, or 6) as compared to a reference DNMT1-associated RNA level, the subject is predicted to have a poor outcome and low metastasis free survival, or a decreased survival chance as compared to a subject who has a DNMT1-associated RNA levels not statistically significant different or similar to reference DNMT1-associated RNA levels. In other embodiments, where the level of DNMT1-associated RNA in the biological sample is at least about 2-fold, at least about 4-fold, at least about 8-fold, or at least about 10-fold decreased (e.g., DNMT1-associated RNA of Table 1, 3, or 5) as compared to a reference DNMT1-associated RNA level, the subject is predicted to have a poor outcome and low metastasis free survival, or a decreased survival chance as compared to a subject who has a DNMT1-associated RNA levels not statistically significant different or similar to reference DNMT1-associated RNA levels. In such instances, a subject identified with a poor outcome and low metastasis free survival, or a decreased survival chance can be treated with a more aggressive anti-cancer treatment regimen.

[0143] In certain embodiments, the subject may be exhibiting a sign or symptom of cancer. In certain embodiments, the subject may be asymptomatic or not exhibit a sign or symptom of cancer, but can be at risk of developing cancer due to certain risk factors as described herein.

[0144] In some embodiments, the methods and assays described herein include (a) transforming the DNMT1-associated RNA into a detectable gene target; (b) measuring the amount of the detectable gene target; and (c) comparing the amount of the detectable gene target to an amount of a reference, wherein if the amount of the detectable gene target (e.g., DNMT1-associated RNA) is statistically different from that of the amount of the reference level for the gene target (e.g., DNMT1-associated RNA), the subject is identified as having cancer or is in need of a treatment for cancer.

[0145] In some embodiments, the reference can be a level of DNMT1-associated RNA in a normal healthy subject with no symptoms or signs of cancer or metastasis. For example, a normal healthy subject who does not have cancer. In some embodiments, the reference can also be a level of expression of DNMT1-associated RNA in a control sample, a pooled sample of control individuals or a numeric value or range of values based on the same. In some embodiments, the reference can also be a level of the biomarker in a tissue sample taken from non-cancerous tissue of the subject. In certain embodiments, wherein the progression of cancer in a subject is to be monitored over time, the reference can also be a level of DNMT1-associated RNA in a tissue sample taken from the tissue of the subject at an earlier date.

[0146] In certain embodiments, a DNMT1-associated RNA, such as listed in Tables 2, 4, and 6, is upregulated in a biological sample, e.g., a biopsy sample from a subject with cancer. If the level of DNMT1-associated RNA is higher than a reference level of that biomarker, the subject is more likely to have cancer or to be in need of a treatment for cancer. The level of a DNMT1-associated RNA, which is higher than a reference level for that DNMT1-associated RNA, by at least about 10% than the reference amount, at least about 20%, at least about 30%, at least about 40%, at least about 50%, at least about 80%, at least about 100%, at least about 200%, at least about 300%, at least about 500% or at least about 1000% or more, is indicative that the subject has cancer.

[0147] In other embodiments, a DNMT1-associated RNA, such as listed in Tables 1, 3, and 5, is downregulated in a biological sample, e.g., a biopsy sample from a subject with cancer. If the level of DNMT1-associated RNA is lower than a reference level of that biomarker, the subject is more likely to have cancer or to be in need of a treatment for cancer. The level of a DNMT1-associated RNA which is lower than a reference level for that DNMT1-associated RNA by at least about 10% than the reference amount, at least about 20%, at least about 30%, at least about 40%, at least about 50%, at least about 80%, at least about 100%, at least about 200%, at least about 300%, at least about 500% or at least about 1000% or more, is indicative that the subject has cancer.

[0148] In another embodiment, the assays can include a system for transforming and measuring the amount levels of DNMT1-associated RNA as described herein and comparing them to reference expression levels. If the comparison system, which can be a computer implemented system, indicates that the amount of the measured expression product is statistically different from that of the reference amount, the subject from which the sample is collected can be identified as having an increased risk for having cancer or for a subject in need of a treatment for cancer or metastasis.

[0149] Systems (and computer readable media for causing computer systems) for performing the methods can include (a) at least one memory containing at least one computer program adapted to control the operation of the computer system to implement a method that includes (i) a determination module configured to identify and detect at the level of DNMT1-associated RNA in a biological sample obtained from a subject; (ii) a storage module configured to store output data from the determination module; (iii) a computing module adapted to identify from the output data whether the level of DNMT1-associated RNA measured in the biological sample obtained from a subject varies by a statistically significant amount from the DNMT1-associated RNA level found in a reference sample and (iv) a display module for displaying whether the level of DNMT1-associated RNA or other markers measured has a statistically significant variation in level in the biological sample obtained from a subject as compared to the reference DNMT1-associated RNA level and/or displaying the relative expression levels of the biomarkers, e.g., DNMT1-associated RNA levels and (b) at least one processor for executing the computer program.

[0150] Embodiments of the invention can be described through functional modules, which are defined by computer executable instructions recorded on computer readable media and which cause a computer to perform method steps when executed. The modules are segregated by function for the sake of clarity. However, it should be understood that the modules/systems need not correspond to discreet blocks of code and the described functions can be carried out by the execution of various code portions stored on various media and executed at various times. Furthermore, it should be appreciated that the modules can perform other functions, thus the modules are not limited to having any particular functions or set of functions.

[0151] The computer readable storage media can be any available tangible media that can be accessed by a computer. Computer readable storage media includes volatile and nonvolatile, removable and non-removable tangible media implemented in any method or technology for storage of information such as computer readable instructions, data structures, program modules or other data. Computer readable storage media includes, but is not limited to, RAM (random access memory), ROM (read only memory), EPROM (erasable programmable read only memory), EEPROM (electrically erasable programmable read only memory), flash memory or other memory technology, CD-ROM (compact disc read only memory), DVDs (digital versatile disks) or other optical storage media, magnetic cassettes, magnetic tape, magnetic disk storage or other magnetic storage media, other types of volatile and non-volatile memory, and any other tangible medium which can be used to store the desired information and which can accessed by a computer including and any suitable combination of the foregoing.

[0152] Computer-readable data embodied on one or more computer-readable media may define instructions, for example, as part of one or more programs that, as a result of being executed by a computer, instruct the computer to perform one or more of the functions described herein, and/or various embodiments, variations and combinations thereof. Such instructions may be written in any of a plurality of programming languages, for example, Java, J#, Visual Basic, C, C#, C++, Fortran, Pascal, Eiffel, Basic, COBOL assembly language, and the like, or any of a variety of combinations thereof. The computer-readable media on which such instructions are embodied may reside on one or more of the components of either of a system, or a computer readable storage medium described herein, may be distributed across one or more of such components.

[0153] The computer-readable media may be transportable such that the instructions stored thereon can be loaded onto any computer resource to implement the aspects discussed herein. In addition, it should be appreciated that the instructions stored on the computer-readable medium, described above, are not limited to instructions embodied as part of an application program running on a host computer. Rather, the instructions may be embodied as any type of computer code (e.g., software or microcode) that can be employed to program a computer to implement aspects of the present invention. The computer executable instructions may be written in a suitable computer language or combination of several languages. Basic computational biology methods are known to those of ordinary skill in the art and are described in, for example, Setubal and Meidanis et al., Introduction to Computational Biology Methods (PWS Publishing Company, Boston, 1997); Salzberg, Searles, Kasif, (Ed.), Computational Methods in Molecular Biology, (Elsevier, Amsterdam, 1998); Rashidi and Buehler, Bioinformatics Basics: Application in Biological Science and Medicine (CRC Press, London, 2000) and Ouelette and Bzevanis Bioinformatics: A Practical Guide for Analysis of Gene and Proteins (Wiley & Sons, Inc., 2nd ed., 2001).

[0154] The functional modules of certain embodiments of the invention include at minimum a determination module, a storage module, a computing module, and a display module. The functional modules can be executed on one, or multiple, computers, or by using one, or multiple, computer networks. The determination module has computer executable instructions to provide e.g., levels of expression products etc in computer readable form.

[0155] The determination module can comprise any system for detecting a signal elicited from the DNMT1-associated RNA described herein in a biological sample. In some embodiments, such systems can include an instrument, e.g., StepOnePlus Real-Time PCR systems (Applied Biosystems) as described herein for quantitative RT-PCR. In another embodiment, the determination module can comprise multiple units for different functions, such as amplification and hybridization. In one embodiment, the determination module can be configured to perform the quantitative RT-PCR methods described in the Examples, including amplification, detection, and analysis.

[0156] The information determined in the determination system can be read by the storage module. As used herein the “storage module” is intended to include any suitable computing or processing apparatus or other device configured or adapted for storing data or information. Examples of electronic apparatus suitable for use with the present invention include stand-alone computing apparatus, data telecommunications networks, including local area networks (LAN), wide area networks (WAN), Internet, Intranet, and Extranet, and local and distributed computer processing systems. Storage modules also include, but are not limited to: magnetic storage media, such as floppy discs, hard disc storage media, magnetic tape, optical storage media such as CD-ROM, DVD, electronic storage media such as RAM, ROM, EPROM, EEPROM and the like, general hard disks and hybrids of these categories such as magnetic/optical storage media. The storage module is adapted or configured for having recorded thereon, for example, sample name, alleleic variants, and frequency of each alleleic variant. Such information may be provided in digital form that can be transmitted and read electronically, e.g., via the Internet, on diskette, via USB (universal serial bus) or via any other suitable mode of communication.

[0157] As used herein, “stored” refers to a process for encoding information on the storage module. Those skilled in the art can readily adopt any of the presently known methods for recording information on known media to generate manufactures comprising expression level information.

[0158] The “computing module” can use a variety of available software programs and formats for computing the relative expression level of the DNMT1-associated RNA described herein. Such algorithms are well established in the art. A skilled artisan is readily able to determine the appropriate algorithms based on the size and quality of the sample and type of data. By way of an example, when the level of DNMT1-associated RNA in a biological sample obtained from a subject is measured, a comparison module can compare or match the output data—with a reference DNMT1-associated RNA level in a reference sample. In certain embodiments, the reference expression level can have been pre-stored in the storage module. During the comparison or matching process, the comparison module can determine whether the expression level in the tissue sample obtained from a subject is lower than the reference expression level to a statistically significant degree. In various embodiments, the comparison module can be configured using existing commercially-available or freely-available software for comparison purpose, and may be optimized for particular data comparisons that are conducted.

[0159] The computing and/or comparison module, or any other module of the invention, can include an operating system (e.g., UNIX) on which runs a relational database management system, a World Wide Web application, and a World Wide Web server. World Wide Web application includes the executable code necessary for generation of database language statements (e.g., Structured Query Language (SQL) statements). Generally, the executables will include embedded SQL statements. In addition, the World Wide Web application may include a configuration file which contains pointers and addresses to the various software entities that comprise the server as well as the various external and internal databases which must be accessed to service user requests. The Configuration file also directs requests for server resources to the appropriate hardware—as may be necessary should the server be distributed over two or more separate computers. In one embodiment, the World Wide Web server supports a TCP/IP protocol. Local networks such as this are sometimes referred to as “Intranets.” An advantage of such Intranets is that they allow easy communication with public domain databases residing on the World Wide Web (e.g., the GenBank or Swiss Pro World Wide Web site). Thus, in a particular preferred embodiment of the present invention, users can directly access data (via Hypertext links for example) residing on Internet databases using a HTML interface provided by Web browsers and Web servers.

[0160] The computing and/or comparison module provides a computer readable comparison result that can be processed in computer readable form by predefined criteria, or criteria defined by a user, to provide content based in part on the comparison result that may be stored and output as requested by a user using an output module, e.g., a display module.

[0161] In certain embodiments, the content displayed on the display module can indicate whether the DNMT1-associated RNA measured have a statistically significant variation in expression (e.g., increase or decrease) between the biological sample obtained from a subject as compared to a reference expression level. In certain embodiments, the content displayed on the display module can indicate the degree to which the DNMT1-associated RNA were found to have a statistically significant variation in expression between the biological sample obtained from a subject as compared to a reference expression level. In certain embodiments, the content displayed on the display module can indicate whether the subject has an increased risk of having cancer, and/or the severity of the cancer. In certain embodiments, the content displayed on the display module can indicate whether the subject is in need of a treatment for cancer. In certain embodiments, the content displayed on the display module can indicate whether the subject has an increased risk of having a more severe case of cancer or metastasis. In some embodiments, the content displayed on the display module can be a numerical value indicating one of these risk or probabilities. In such embodiments, the probability can be expressed in percentages or a fraction.

### Example

[0162] In this Example we identified specific interactions between a subset of human lncRNAs and the DNA methyltransferase DNMT1 using RNA co-immunoprecipitation (RIP) followed by next generation RNA sequencing (RIP-seq) (FIG. 1A). Analysis of one such lncRNA, TCONS_00023265, which we named DACOR1, revealed a critical role of this lncRNA in regulating DNA methylation and gene expression in colon cells. Furthermore, induction of DACOR1 is sufficient to suppress the growth of colon cancer cells by regulating the expression of specific genes and pathways including cellular metabolism. Our results suggest a potential new mechanism by which the human methylome is regulated in human health and disease.

### Material and Methods

### Optimization of RIP in HCT116 Cells

[0163] We have previously utilized RIP in human fibroblasts and HeLa cells to identify interactions between human lncRNAs and several chromatin-modifying complexes. For this study, we optimized our RIP protocol in HCT116 cells by initially performing control experiments on a well-conserved RNA-protein interaction in the spliceosome: the interaction between U1-70K protein and the small nuclear RNA U1. First, we tested an antibody against U1-70K in immunoprecipitation experiments and confirmed that this antibody specifically immunoprecipitates U1-70K protein from HCT116 cell lysate. We also used an IgG antibody that should not recognize any protein as a negative control. Subsequently, we performed three independent biological replicates of U1-70K RIPs from crosslinked HCT116 cell lysate. After several stringent washes, we reversed the formaldehyde crosslinking by heat and isolated associated RNA using Trizol. Quantitative Real-time PCR (qRTPCR) analysis of U1 RNA using three distinct endogenous controls (GAPDH, 18S rRNA and CLDN3) revealed a specific interaction between U1-70K and U1RNA. These results suggest that our RIP protocol is optimized in HCT116 to detect specific RNA-protein interactions.

### Immunoprecipitation (IP) of U1-70K and Flag-DNMT1 and Western Blot Analysis

[0164] We utilized an antibody against U1-70K (Synaptic Systems, Cat #203 001) to immunoprecipitate (IP) the U1-70K protein, and antiflag antibody to IP flag-DNMT1 from HCT116 cell lysates as follows: HCT116 cells were grown in 2×15 cm plates before harvesting by trypsin. An equal amount of media was added to quench the reaction, and the cells were collected by centrifugation in a 15-ml conical tube at 500 g for 10 min. The pellets were washed twice with PBS prior to fixing in a final concentration of 0.3% formaldehyde for 15 min at room temperature. The reaction was quenched by adding glycine to a final concentration of 0.125 mM and incubated at room temperature for 5 min. The cells were pelleted by spinning at 500 g for 10 min and then washed twice with 1×PBS before suspending the pellets in 2.2 ml of RIPA buffer (150 mM NaCl, 1% NP-40, 0.5% sodium deoxycholate, 0.1% SDS, 50 mM Tris-HCl (pH 7.4), 1 mM EDTA). The cells were incubated at 37° C. for 30 min and vortexed every 5 min at 30-s intervals for the duration of the incubation. Samples were homogenized using a dounce homogenizer to disrupt cellular membranes. The lysate was centrifuged using a microcentrifuge at maximum speed (˜13 300 RPM), and the supernatant was transferred to a new tube. A total of 100 μl of the supernatant was taken as input, and half of remaining supernatant was incubated with an antibody against protein of interest (i.e., U1-70K or flag-DNMT1), and the second half with an IgG antibody (negative control) overnight with rotation at 4° C. Next day, 50 μl of protein A/G magnetic beads was added to each tube and incubated for 30 min at room temperature with rotation. The beads, which now have the antibody and bound protein, were collected using a magnet and washed three times with RIPA buffer and once with 1×PBS. For protein analysis bywestern blot, we added 100 μl of Laemmli buffer to each tube and incubated the samples at 95° C. for 5 min before running the samples on a denaturing SDS-PAGE gel.

### RNA Co-Immunoprecipitation of U1-70K and Flag-DNMT1

[0165] The same protocol described earlier was utilized for RIP of U1-70K or flag-DNMT1 from HCT116 cells. However, for the isolation of co-immunoprecipitated RNAs, we suspended the magnetic beads+antibody+protein in 100 μl of buffer C (150 mM NaCl, 50 mM Tris-HCl (pH=7.4), 5 mM EDTA, 10 mM DTT, 1% SDS) and 10 μg of proteinase K. The samples were incubated at 42° C. for 30 min for protein digestion, and subsequently at 65° C. for 4 h to reverse the formaldehyde crosslinking. RNA was isolated by adding 800 μl of Trizol and 200 μl of chloroform to each sample, mixed and centrifuged at full speed for 10 min, and the upper clear layer (˜600 μl) was transferred to a 1.5-ml tube with 600 μl of 70% ethanol. The mixture was applied to an RNeasy mini kit column (Qiagen) according to the manufacturer's protocol. All samples were treated with DNase prior to final washes and elution with 20 μl of RNase-free water.

Analysis of RNA-Seq Data from RIP-Seq Samples

[0166] RNA-sequencing libraries were made using a stranded ScriptSeq V2 (Illumina) according to the manufacturer's protocol. Raw RNA-seq fastq files were aligned to UCSC human hg19 using TopHat v2.0.10. Transcript assembly was performed using Cufflinks v2.1.1. Relative transcript abundance for both mRNAs and lncRNAs was reported as fragments per kilobase of exon per million fragments mapped (fpkm). If fpkm values reported in the input sample were less than 1.0 for mRNAs and less than 0.1 for lncRNAs, the transcript was filtered as not expressed in HCT116 cells. Fold changes were then calculated as the average fpkm across RIP samples to the fpkm of the input control sample. Transcripts were identified as binding to DNMT1 if their fold change was greater than 2-fold. Heatmaps were generated using the heatmap function in the gplots package (version 2.12.1) in R [R Core Development Team. (2011) R: a language and environment for statistical computing. R Foundation for Statistical Computing, Vienna, Austria.]

### Quantitative Real-Time-PCR

[0167] RNA was converted to cDNA using RNA to cDNA EcoDry™ Premix Random Hexamers (Clontech). TaqMan assays for GAPDH, 18s rRNA, U1, CLDN3 and DACOR1 were purchased from Life Technologies. Other primer pairs were designed using primer3 software, and most primers used were designed to span exon-exon boundaries. TaqMan Mastermix (Life Technologies) or Maxima SyBr Green/ROX qPCR Master Mix (Thermo Scientific) was used for qRT-PCR. A comparative C_{T} quantitation was performed with a hold stage of 50° C. for 2 min and 95° C. for 10 min followed by 40× cycle of 95° C. for 15 s and 60° C. for 1 min and finally melt curve at 95° C. for 15 s, 60° C. for 1 min and a ramp to 95° C. at 0.3° C. increments. Analysis was done using the 2_ΔΔCT method with GAPDH as the reference gene.

### Colony Formation Assay

[0168] The colon cancer cell lines V481, V852, V866, V703 and V425 were transduced with either a control or DACOR1 lentivirus, and noninfected cells were eliminated by puromycin. For CFAs, cells were plated in either 6-well or 10-cm plates in triplicates of each condition (control versus DACOR1 lentivirus). Cells were plated at 1250, 2500, 5000 or 10 000 cells per well/plate and kept under puromycin selection. Colonies were fixed with methanol/acetic acid and subsequently stained with 0.1% crystal violet solution. Plates were scanned, and colonies were counted using the publically available ImageJ software. Average colony counts were calculated for control and DACOR1 plates for each cell line, and a paired t-test was used to test for statistical significance.

### Illumina 450K DNA Methylation Arrays

[0169] DNA was extracted from V481 and V852 cells using the DNeasy Blood and Tissue kit (Qiagen). DNA methylation profiling was performed at the Genomics Core Facility at Case Western Reserve University using the Illumina 450KHumanMethylation BeadChip (12 samples/chip). Biological triplicates from both the control and DACOR1 lentivirus-transduced cells were tested in order to detect accurate methylation status. Beta values, a ratio of the methylated/un-methylated signal, were reported and ranged from 0 (completely un-methylated) to 1 (completely methylated). In filtering probes, each cell line was analyzed separately. Reported beta values were removed if the P-value for detectable probe signal was >0.05. Targets were then filtered if only a single beta value remained in either condition. The median beta value was calculated for control and DACOR1 samples. Targets were further filtered if the difference in the maximum beta and minimum beta was >0.1 (10% different). Using the median beta, sites were determined as differentially methylated if the absolute value of the delta-beta was >0.1 (>10%).

### Next-Generation RNA Sequencing

[0170] Six RNA samples were isolated from V852 cells transduced with either a control lentivirus (n=3) or DACOR1 lentivirus (n=3). RNAs with RNA integrity number of >8 (max is 10) were considered high quality and suitable for RNA-seq. Library preparation was performed using Scriptseq™ Complete Gold (Human/Mouse/Rat) (Illumina) and sequenced on an Illumina Hi-Seq2500. All six samples were run on a single flow cell, and 100-bp paired-end strand specific sequencing reads were generated and mapped to human genome release hg19 using TopHat with two mismatches allowed for full-length reads. The raw reads were mapped to human genes annotated in Ref Seq database using Cufflinks V2.0.2, and CuffDiff was used for identifying differentially expressed genes. All expression values were calculated as fragment per kilo base of exon per million of mapped fragments (fpkm).

### ChIRP-Seq of DACOR1

[0171] The ChIRP-seq protocol was carried out as previously described by Chu et al. Briefly, 5×10⁸ V852 cells with DACOR1 lentivirus were first crosslinked using 1% formaldehyde for 10 min. The cells were spun down, suspended in Buffer A (Hepes 20 mM, KCl 10 mM, MgCl2 1.5 mM, DTT 0.5 mM, 1% Empigen) and dounced before collecting the nuclei by centrifugation. The nuclei were sonicated in nuclei lysis buffer (Tris-HCl pH 7.5, 20 mM, EDTA 10 mM, 1% SDS, 1 mM DTT, protease inhibitor cocktail, RNaseOut 80 U/ml) to produce 100- to 500-bp DNA fragments. LiCl₂ was added at 0.5 M to nuclear lysates. Equal amounts of nuclear lysates were incubated with either DACOR1-specific or non-specific DNA probes modified with a TEG linker and Biotin at their 5′ ends and incubated for 24 h at 37° C. with rotation. Next day, Ribo-Minus™ streptavidin-coated magnetic beads (Life Technologies) were blocked with 800 μg/ml yeast tRNA and 800 μg/ml BSA for 1 h at 37° C. in hybridization buffer (Tris-HCl pH 7.5 5 mM, EDTA 10 mM, LiCl2 500 mM) before washing and adding to nuclear lysates for 30 min. The beads were then washed three times with nuclear lysis buffer, wash buffer (Tris-HCl pH 7.5 5 mM, EDTA 0.5 mM, NaCl 1 M) and PBS. The beads were suspended in 200 μl of PBS and incubated at 75° C. for 5 min; the supernatant was collected from the beads and incubated at 65° C. overnight to reverse crosslinking before extracting DNA using DNeasy Blood & Tissue Kit (Qiagen). Paired-end DNA sequencing was performed on a HiSeq2000/2500 at Otogenetics Corporation. DNA reads were mapped against human genome (hg19) using Bowtie 2, and peak calling was performed by using MACS2. Peak annotation was completed using ChIPpeakAnno.

### PKM2 Activity Assay

[0172] Cells were collected by trypsinization, and pellets were washed twice by cold PBS. The pellets were then resuspended in RIPA buffer (150 mM NaCl, 1 mM EDTA, 1 mM DTT, 1% Triton X-100, 25.5 mM deoxycholic acid and 50 mM Tris-HCl, pH 7.5) and sonicated briefly at 4 C. The total extracts were subjected to PKM activity assay as follows: reaction mixtures contain 50 mM Tris-HCl pH 7.5, 100 mM KCl, 5 mM MgCl2, 0.5 mM ADP, 0.2 mM NADH, 8 units LDH (lactate dehydrogenase from sigma) and 1 mM DTT. The lysates (1-10 μg of total protein) were added to the assay mixture to reach 200 of the final volume in 96-well plates. The enzymatic reaction was initiated by the addition of PEP (phosphoenolpyruvic acid, 0.5 mM) as the substrate. The oxidation of NAPH was monitored at 340 nm for 3 mM using a Thermo Max microplate reader (Molecular Devices). The number of units of NADH oxidation was calculated using the standard extinction coefficient of NADH (ε=6.22 mM-1 cm⁻¹). This value was then divided by the total amount of protein added in the assay giving units per milligram of protein from the cell extracts. For all analyses, PKM2 activity was calculated using an amount of cell lysate where the reaction rates fell within the linear range of dependence on the concentration of lysate.

### Results

[0173] Identification of DNMT1-Associated lncRNAs in Colon Cancer Cells

[0174] We optimized our RIP protocol in the colon cancer cell line HCT116 and subsequently utilized it to identify potential interactions between DNMT1 and RNAs. As there are no reliable DNMT1 antibodies that are suitable for RIP applications, we utilized a knock-in DNMT1_3×-flag HCT116 cell line to overcome this limitation. First, we confirmed that DNMT1 is specifically immunoprecipitated, but not other abundant nuclear proteins such as U1-70K or histone H3 (FIG. 1B). To identify RNAs that potentially interact with DNMT1, we performed triplicate RIPs of DNMT1 using an anti-flag antibody and triplicate RIPs using an anti-IgG antibody as negative controls. We isolated co-immunoprecipitated RNAs and quantified the small amount of DNMT1-bound RNAs. We were able to generate RNA-seq libraries from DNMT1 RIPs but not from IgG RIPs, owing to depletion of non-specific RNAs by several stringent washes.

[0175] Three RNA-seq libraries from three independent biological replicates of DNMT1 RIPs were sequenced and mapped to the human genome (hg19). We also sequenced total nuclear RNA (input) from HCT116 cells as a control for our RIP experiments. We generated fpkm values for mRNAs and lncRNAs detected in the input sample and each of the three biological replicates of DNMT1 RIP-seq. The average fpkm of each transcript in the three biological replicates of DNMT1 RIP-seq was divided by the fpkm in the input sample to generate fold changes. We identified 148 lncRNAs (14% of lncRNAs detected in the input) and 31 mRNAs (0.009% of mRNAs detected in the input) as DNMT1-associated RNAs based on a 2-fold change or higher above input (FIG. 1C-F). We found the highest fold change of an lncRNA associated with DNMT1 to be ˜41-fold, whereas the highest fold change for an mRNA was only 7-fold, despite mRNAs being expressed at much higher levels than lncRNAs across all cell types. To rule out non-specific co-immunoprecipitation of highly abundant RNAs with DNMT1, we compared the expression of all DNMT1-bound versus DNMT1-unbound lncRNAs and mRNAs. We found that there was no expression bias of DNMT1-associated lncRNAs or mRNAs in comparison with unbound lncRNAs and mRNAs (FIG. 1G-H). Lastly, a close examination of DNMT1-associated mRNAs revealed that at least half of these mRNAs are poorly annotated transcripts with predicted open reading frames or miRNA precursors, suggesting that very few mRNAs associate with DNMT1. In summary, we have identified many lncRNAs and very small number of mRNAs that co-immunoprecipitate with DNMT1 in HCT116 cells by RIP-seq.

The DNMT1-Associated lncRNA, DACOR1, is Down-Regulated in Colon Cancer Cells

[0176] One DNMT1-associated lncRNA, designated TCONS_00023265, was of interest to us owing to its notable high, tissue-specific expression in normal colon tissues (FIGS. 2A and B) and repression in colon tumors and patient-derived colon cancer cell lines (FIGS. 2C and D). We therefore named this lncRNA DNMT1-associated Colon Cancer Repressed lncRNA 1 (DACOR1) (see below). In a panel of 12 human normal tissues, DACOR1 shows the highest expression in the colon as measured by qRT-PCR (FIG. 2A). We confirmed the expression of DACOR1 in the normal colon by RNA in situ hybridization and observed DACOR1 expression in the nuclei of colon crypts, the cells from which colon cancer originates (FIG. 2B, large panel). We also observed that DACOR1 occupies several discrete foci in the nucleus (FIG. 2B, small panel). Next, we examined DACOR1 expression in a cohort of 22 colon tumors in comparison with matched normal tissue based on RNA-seq data obtained from The Cancer Genome Atlas (TCGA). This analysis revealed that DACOR1 is down-regulated in colon tumors (FIG. 2C). We also examined the expression of the protein-coding gene SMAD3, the nearest coding gene to DACOR1, in the same TCGA cohort and found that SMAD3 shows variable expression in tumors versus normal colon. To further confirm that DACOR1 is down-regulated in colon cancer, we examined its expression by qRT-PCR in 8 normal colon samples and 21 patient-derived colon cancer cell lines with limited passage in culture (FIG. 2D). Several of the colon cancer cell lines displayed very low expression levels of DACOR1 that were barely detectable by qRT-PCR, further confirming the down-regulation of DACOR1 during colon tumorigenesis (FIG. 2D). These intriguing observations prompted us to further investigate the potential role of DACOR1 in colon cancer biology and its effects on DNA methylation and gene expression.

### DACOR1 Affects DNA Methylation Levels at Multiple Sites in the Human Genome

[0177] To determine the functional significance of DACOR1 association with DNMT1, we first validated the interaction of DACOR1 with DNMT1 in independent RIP experiments using RIP-qPCR (FIG. 3A). As a negative control, we examined the association of the highly abundant nuclear RNA U1 with DNMT1 and found no association (FIG. 3B). We then tested the effects of DACOR1 induction on DNA methylation in two distinct patient-derived colon cancer cell lines, V481 and V852. We transduced V481 and V852 cells with either a control or DACOR1 lentivirus, and the appropriate expression and nuclear localization of DACOR1 were confirmed by qRT-PCR and RNA in situ, respectively (FIGS. 7A and B). We isolated genomic DNA from these cell lines, and equal amount of DNA (1 μg) from each sample (n=12) was used for DNA methylation analysis using 450K DNA methylation arrays (Illumina). These arrays cover ˜500 000 CpG sites out of the 28 million CpG sites in the human genome. We identified 43 and 59 specific CpG sites in V481 and V852, respectively, which become differentially methylated in response to DACOR1 expression (FIG. 3C). Of these sites, 42/43 (in V481) and 58/59 (in V852) displayed a gain of DNA methylation (P<1×10-11 and 2.1×10-16, respectively). Next, we determined whether restoration of DACOR1 expression affected DNMT1 protein levels. We performed western blot analyses using a DNMT1 antibody in cells transduced with a control or DACOR1 lentivirus and found that DNMT1 protein levels were unchanged. In summary, DACOR1 induction appears to enhance DNA methylation at multiple loci without affecting DNMT1 protein levels.

### DACOR1 May Play a Role in Maintaining the Epithelial State of Colon Crypts

[0178] The high expression of DACOR1 in normal colon tissues and the localization of DACOR1 to colon crypts prompted us to examine its potential role in regulating the epithelial state of colon cells. To that end, we examined the effects of DACOR1 induction on the levels of key epithelial markers including Tight Junction Protein 1 (TJP1) and E-cadherin in two distinct colon cancer cell lines. We found that the expression of DACOR1 led to higher levels of TJP1 protein, but not E-Cadherin (FIG. 3D). To determine whether the change in TJP1 is at the transcriptional or post-transcriptional level, we measured TJP1 mRNA levels by qRT-PCR in three distinct colon cancer cell lines. We found DACOR1 expression to have no effect on TJP1 mRNA levels, suggesting that TJP1 protein levels are regulated posttranscriptionally by DACOR1 in colon cells. We also compared TJP1 mRNA levels in a cohort of 22 colon tumors versus 22 matched normal tissues from TCGA and found that TJP1 mRNA levels are not significantly affected in most patients, suggesting that TJP1 protein levels are regulated post-transcriptionally in colon tumors.

### DACOR1 Induction Reduces the Clonogenic Potential of Colon Cancer Cells

[0179] Our studies demonstrated that DACOR1 is down-regulated in colon tumors and patient-derived colon cancer cell lines, but the biological significance of this repression is yet to be determined. Normal colon crypts do not propagate in tissue culture, preventing us from performing knockdown experiments of DACOR1. We, therefore, examined the biological effects of DACOR1 by overexpressing it in several patient-derived colon cancer cell lines. Initially, we utilized three distinct patient-derived colon cancer cell lines (V481, V852 and V866) that we transduced with either a control or a DACOR1 lentivirus. Induction of DACOR1 in these patient derived colon cancer cell lines resulted in reduced growth of these cells. To quantify this effect, we performed colony formation assays (CFAs) using all three lines (V481, V852 and V866) and found that the induction of DACOR1 affected colony formation in V481 by ˜25% (P=0.0002), in V852 cells by ˜53% (P=0.003) and in V866 by 81% (P=0.007) (FIG. 3E). The effect of DACOR1 induction, although consistent in reducing colonies, varied among the three lines as each line was derived from a distinct patient tumor and thus has underlying genetic differences.

[0180] To test whether the effects we observed on colony formation were due to non-specific effects of overexpressing DACOR1, we performed several control experiments. First, we selected two patient-derived colon cancer cell lines, V703 and V425, that although had reduced levels of DACOR1 relative to normal colon; they still maintained some level of DACOR1 expression (FIG. 2D). Overexpression of DACOR1 in both cell lines had minor effects on colony formation of these cells, when compared with a control lentivirus (FIG. 9A-D). Second, to rule out that the phenotype is due to high expression levels of DACOR1 lentivirus (CMV promoter), we cloned the full length of DACOR1 downstream of a weak Pgk promoter and measured its expression levels in comparison with normal colon and control lentivirus. Using this approach, we are able to bring the overexpression level of DACOR1 closer to the expression levels observed in normal colon. We carried out CFAs of control versus DACOR1 lentivirus-transduced cells and also observed significant reduction in colony formation. Finally, we cloned the full length of an oncogenic lncRNA, TCON_00011938, which is not associated with DNMT1, downstream of a strong CMV promoter, and found that the overexpression of this distinct lncRNA led to increased colony formation. Collectively, these results suggest that DACOR1 induction reduces the clonogenic potential of colon cancer cells.

### DACOR1 Induction Affects Global Gene Expression of Colon Cancer Cells

[0181] To gain insights into DACOR1 function, we performed RNA-seq using RNA isolated from the colon cancer cell line V852 transduced with either control or DACOR1 lentivirus and identified differentially expressed genes. We found that induction of DACOR1 affected the expression of 99 genes (P<0.05, q<0.05). Specifically, we observed that induction of DACOR1 led to the repression of several known inhibitors of TGF-β/BMP signaling, including SMAD6, INHBE (inhibin beta E) and FST (follistatin), which we confirmed by qRT-PCR in two distinct colon cancer cell lines (FIG. 4A). Previous studies have demonstrated that TGF-β/BMP signaling exerts a tumor-suppressor function in the colon, and it becomes inactivated or repressed in a majority of sporadic colorectal cancers. SMAD6, which is up-regulated in colon tumors and down-regulated by DACOR1, plays a major role in repressing TGF-β/BMP signaling.

[0182] We also found that the induction of DACOR1 led to the downregulation of several genes involved in amino acid metabolism with known roles in tumorigenesis, including PHGDH, PSAT1, CBS and ASNS. First, we confirmed that the induction of DACOR1 leads to the repression of these genes in two distinct colon cancer cell lines, V852 and V866, by qRT-PCR (FIG. 4B). We subsequently confirmed the repression of PHGDH at the protein level by western blot analysis (FIG. 4C). PHGDH plays a key role in de novo serine biosynthesis and is highly up-regulated in many colon tumors. To determine whether the repression of PHGDH by DACOR1 induction affects serine levels, we measured pyruvate kinase M2 (PKM2) activity, which is dependent on serine. Indeed, we found that DACOR1 induction leads to reduced PKM2 activity in two independent experiments (three replicates each) (FIG. 4D), without affecting overall PKM2 protein levels (FIG. 4C). Lastly, the repression of Cystathionine β-synthase (CBS) by DACOR1 is intriguing (FIG. 4C), as reduced CBS levels are known to lead to increased methionine, the substrate needed to generate S-adenosyl methionine (SAM). SAM is the key methyl donor utilized by DNA methyltransferases for DNA methylation in mammalian cells. Thus, DNMT1-DACOR1 interaction appears to indirectly regulate cellular SAM levels, and, consequently, genome-wide DNA methylation. Collectively, these findings suggest that DACOR1 plays key roles in regulating DNA methylation and specific tumor-suppressor and metabolic pathways in colon cells to potentially suppress colon tumorigenesis.

[0183] DACOR1 Interacts Directly with Chromatin at Specific Genomic Sites

[0184] To gain insights into the potential mechanism(s) by which DACOR1 could regulate gene expression and consequently cellular phenotype, we mapped the genomic occupancy of DACOR1 across the entire human genome using ChIRP-seq. First, we designed several biotin-modified oligonucleotides complementary to DACOR1 and confirmed that we can specifically isolate DACOR1 from crosslinked cell lysates (FIG. 5A). Subsequent ChIRP-seq and analysis identified 338 DACOR1 genomic occupancy sites, including 161 peaks near 150 annotated genes (multiple peaks per gene in some cases) and 177 sites in intergenic regions. As expected, we observed a peak corresponding to the genomic region of DACOR1 transcription upstream of SMAD3, as we also captured newly synthesized DACOR1 transcripts. We compared the genomic occupancy sites of DACOR1 near annotated genes with differentially methylated regions (DMRs) in a cohort of colon tumors versus matched normal tissues. Of the 150 annotated gene loci occupied by DACOR1, 31 sites overlap with these DMRs (P<3.5×10-14) (FIG. 5B). These findings indicate that DACOR1 interacts with both DNMT1 and chromatin and, potentially, recruits and/or assembles the DNMT1 macromolecular protein complex at specific genomic sites to regulate epigenetic modifications and, consequently, the expression of specific genes and pathways (FIG. 5C).

[0185] The referenced patents, patent applications, and scientific literature, including accession numbers to GenBank database sequences, referred to herein are hereby incorporated by reference in their entirety as if each individual publication, patent or patent application were specifically and individually indicated to be incorporated by reference. Any conflict between any reference cited herein and the specific teachings of this specification shall be resolved in favor of the latter. Likewise, any conflict between an art-understood definition of a word or phrase and a definition of the word or phrase as specifically taught in this specification shall be resolved in favor of the latter.

1. A method for treating cancer in a subject in need thereof, the method comprising:
administering to cancer cells of the subject an agent effective to modulate the level of DNMT1-associated RNA and/or the interaction of DNMT1-associated RNA and DNMT1 in the cancer cells of the subject.

2. The method of claim 1, wherein the agent is effective to decrease the level of DNMT1-associated RNA that is over expressed in the cancer cells compared to normal cells.

3. The method of claim 1, wherein the cancer is selected from the group consisting of breast cancer and colon cancer.

4. The method of claim 1, wherein the DNMT1-associated RNA is DNMT1-associated long non-coding RNA.

5. The method of claim 1, wherein the DNMT1-associated RNA includes at least one of linc-GATA5-1, linc-FAM84B-9, linc-OR10H4, linc-DUSP26-6, linc-CCDC40-1, linc-CSPP1, linc-ASPSCR1, linc-U2AF1-5, linc-BEAN1, linc-EFR3A-7, linc-SLC25A45-5, linc-SEMA3A, linc-CXXC4-1, linc-EFR3A-4, linc-JAKMIP3-3, linc-KIAA1755-4, linc-EPHB4, linc-GAD1-1, linc-IGFBP2-3, linc-CCDC122-4, linc-NADSYN1-2, linc-DUSP26-1, linc-EFR3A-5, linc-TCF20, linc-RSPH1-1, linc-DUXA-2, linc-RTEL1, linc-INO80, linc-UBE3C-2, linc-STIM2-1, linc-VEZF1, linc-GPR183-2, linc-WHAMM-1, linc-FRMPD1, linc-MIB2, linc-SERTAD2-4, linc-HAAO-4, linc-CDH5-3, linc-NDUFAF2-3, linc-PPM1J, linc-LY6H, linc-MKLN1-2, linc-SERPIND1, linc-TCP10-5, linc-PPIAL4F-1, linc-BIRC7-3, linc-S100B-2, linc-C1QTNF9B, linc-PXN, linc-SRL, linc-ZNF692-6, linc-BDH1-3, linc-RALGAPB, linc-MYOD1, linc-OR4F16-9, linc-MUC20-3, linc-BTBD6-1, linc-CDK13-1, linc-ZNF8-2, linc-HIST1H2A1-2, linc-OR7C2-1, linc-MZF1-2, linc-CMPK1-3, linc-ARHGAP28-9, linc-NACC1, linc-BMS1-4, linc-TCP11L2-1, linc-CANX-1, linc-KCTD7-2, linc-TMEM105-2, linc-MRPS31, linc-RGL4-1, linc-METTL14-1, linc-NDUFB4-5, linc-ARF5-2, linc-NBPF15-1, linc-PHF10, linc-NADSYN1-1, linc-TMEM183B-1, linc-CALCOCO2-3, linc-BDH1-2, linc-ADAMTSL4, linc-RPS7-1, linc-ATP6V1C2-4, linc-FSCN2-1, linc-TUBGCP3-2, linc-HOXD1, linc-TGFBRAP1, linc-NOP14-3, linc-IER5L-2, linc-ASPRV1-1, linc-TPT1-2, linc-OAF-6, linc-COX5B-3, linc-ZBED1-4, linc-HIST1H2A1-1, linc-CALCOCO2-2, linc-ARF6-1, linc-MAP7-BP, linc-LOC285033-4, linc-ZNF674, linc-HTR5A-1, linc-GPR179, linc-RPP40, linc-SATB2-2, linc-MUC20-2, linc-ZNF516-4, linc-STX17, linc-CDH6-7, linc-SERHL2-3, or linc-OR4F16-4.

6. The method of claim 1, wherein the DNMT1-associated RNA includes at least one of linc-TMEM169-3, linc-HEATR6-2, linc-TM4SF4-2, linc-DACT2-3, linc-SAFB-2, linc-PTPRS-2, linc-ZPBP2, linc-MGAT4A, linc-DUSP26-5, linc-CA5A-2, linc-MERTK-2, linc-ABCA5-3, linc-GUCA2B, linc-HOXD1, linc-FOXA1-2, linc-EGLN1-2, linc-LRRC49-4, linc-TMEM18-13, linc-ANKRD27, linc-LAMA1-5, linc-TMEM183B-1, linc-UGDH, linc-PKMYT1, linc-PPP1R1B, linc-WFDC2-2, linc-DYNC1L11-2, linc-DHX37-22, linc-OAF-6, linc-ODF3B, linc-ARHGAP28-9, linc-DUSP26-6, linc-EVX2-8, linc-COPZ2, linc-DLGAP5-1, linc-XRCC4-3, linc-ZIC5, linc-KIN-5, linc-NACC1, linc-SERTAD2-4, linc-ASPSCR1, or linc-KIAA0232.

7. The method of claim 1, wherein the DNMT1-associated RNA includes at one of linc-DUSP26-6, linc-ASPSCR1, linc-SERTAD2-4, linc-ARHGAP28-9, linc-NACC1, linc-TMEM183B-1, linc-HOXD1, or linc-OAF-6.

8. The method of claim 2, wherein the agent comprises an RNA inhibitor of the DNMT1-associated RNA.

9. The method of claim 2, wherein the agent is selected from the group consisting of siRNA, miRNA, stRNA, snRNA, and antisense nucleic acid to the DNMT1-associated RNA.

10. The method of claim 1, wherein the agent is effective to increase the level of DNMT1-associated RNA that is under expressed in the cancer cells compared to normal cells.

11. The method of claim 1, wherein the cancer is selected from the group consisting of breast cancer and colon cancer.

12. The method of claim 1, wherein the DNMT1-associated RNA includes at least one of linc-SMAD3, linc-ANXA8L2-2, linc-TRAK1, linc-AP2B1-2, linc-UTRN, linc-TBX18, linc-GPR65-6, linc-STIL-2, linc-ENPP6-2, linc-GABRA5-6, linc-MRPS18C, linc-EGFL7-1, linc-KLHL31-2, linc-PSMA8-3, linc-ZNF404, linc-HMGB2, linc-OAF-4, linc-FRG1-5, linc-HIST1H3A, linc-TMEM56-3, linc-DBT-3, linc-GNAI1-2, linc-BCL2L10, linc-EPHA6-1, linc-PLDN, linc-GABRA5-5, linc-ACO1-2, linc-NEDD4L-1, linc-MTRNR2L1-2, linc-FAM155B, linc-GIMAP8-1, linc-MAGI2-3, linc-DHX37-17, linc-KLF6-3, linc-RAP1GAP2-1, linc-TMPRSS2-2, linc-C10orf57-3, linc-GPR157-3, linc-LAMA4-2, linc-STIM1, linc-RFC2-2, linc-MRGPRF-1, linc-DEFB105B-2, linc-CTDSP2-1, linc-PRPS1L1, linc-SLC19A1-4, linc-C1orf43-2, linc-COX4NB-8, linc-HES1-3, linc-FIGNL1, linc-OAF-2, linc-COX4NB-9, linc-FBXL5-2, linc-TMEM220-2, linc-KCNMB2-5, linc-KIAA0141, linc-DHX37-19, linc-RGMA-7, linc-ID2-1, linc-SHISA6-1, linc-SYT4-1, linc-TRIML2-5, linc-DHFRL1-4, linc-RGS9-1, linc-ODF2L, linc-SLC22A16, linc-ZPBP2, linc-AGMAT-3, linc-MT1B, linc-GRPEL1-1, linc-PFDN4-2, linc-OPRK1-4, linc-ZNF583-1, linc-PFDN4-3, linc-SAMSN1-3, linc-USP3-1, linc-SHISA6-2, linc-ADAM29-3, linc-ZEB2-7, linc-MLL5, linc-FOXF1-3, linc-BTBD3-3, linc-GPATCH2-9, linc-ARHGEF37-2, linc-KLF6-2, linc-CLMN-1, linc-FOXG1-4, linc-TAAR9-1, linc-GTPBP8, linc-ADAR, linc-SAFB-2, linc-CXorf49B-2, linc-SLCO2A1-1, linc-PTPRS-2, linc-EPCAM, linc-LPHN2-1, linc-AMN1, linc-FAM55D, linc-FAM75A6-4, or linc-PHOX2B-2.

13. The method of claim 1, wherein the DNMT1-associated RNA includes at least one of linc-GHRH, linc-VPS36-1, linc-C20orf79, linc-AUTS2-5, linc-ISLR2-3, linc-ZNF692-6, linc-IER31P1, linc-MANSC1, linc-CXADR-3, linc-ZFHX3-4, linc-ZNF404, linc-FAAH2-2, linc-CLRN2-1, linc-ATP6V1C2-3, linc-METTL14-2, linc-MAP1 LC3B-2, linc-TCP11L2-1, linc-GARS-1, linc-NOP14-3, linc-ANKRD55-6, linc-ARFIP1-8, linc-C17orf87, linc-AMAC1, linc-SYT4-1, linc-HTR1D, linc-WNT7B-2, linc-MAP1LC3B2-2, linc-TP53TG3B-6, linc-TMEM105-2, linc-MICB, linc-PLGLB2, linc-OR4F16-9, linc-RBM10, linc-KIAA1712-5, linc-CBLB-6, linc-ATG2B-2, linc-ADI1, linc-SPRY3-1, linc-BEAN1, linc-SHOX-5, linc-WIPF3, linc-SHOX-4, linc-DCAF17-1, linc-TNFRSF14, linc-GPR65-6, linc-PHF10, linc-ZNF692-5, linc-POLR3A-1, linc-LOC389493-2, linc-AP2B1-2, linc-LRRTM3-3, linc-SFMBT1, linc-BTBD6-1, linc-MTHFD2, linc-PRSS42, linc-RGMB-1, linc-ITIH2-10, linc-TPBG-3, linc-TMEM194A, linc-FRG2C-3, linc-ZKSCAN1-1, linc-HEATR2-2, linc-CDK13-1, linc-GIMAP8-1, linc-FAM101A-2, linc-IFITM5, linc-LRRTM3-2, linc-METTL14-1, linc-GTPBP8, linc-KLF13-1, linc-SLC5A3-2, linc-BET3L, linc-TUBGCP3-2, linc-CDH1, linc-PTGR2, linc-CDK17-4, linc-COG3-3, linc-CBR1-1, linc-CCR8-3, linc-LOC150786, linc-FRG1-5, linc-GABRA5-7, linc-DYDC1-5, linc-CREB1-1, linc-LEPROTL1-7, linc-C6orf145-3, linc-HIST1H2AG-4, linc-THSD4, linc-HS3ST3A1-1, linc-KLRC1, linc-ZNF583-1, linc-ZNF253-2, linc-UTRN, linc-ATP6V1C2-4, linc-GRPEL1-1, linc-TTC7A-2, linc-COG3-1, linc-IFLTD1, linc-GALNTL5-1, linc-PCM1, linc-ISLR2-2, linc-DHCR7-2, linc-HES5-2, linc-USP8, linc-VPS8-2, linc-RGL4-1, linc-CEBPG, linc-CRH-2, linc-DR1, linc-UBQLN2, linc-MTRNR2L9-3, linc-ID2-3, linc-TMED5, linc-RAB23-4, linc-NDFIP2-1, linc-ARHGAP5, linc-WRNIP1-2, linc-ANKRD20A1-14, linc-TLN2-1, linc-VPS8-3, linc-CNTNAP4, linc-CHMP2B-1, linc-CXADR-2, linc-LOC285033-5, linc-ARHGAP28-2, linc-RGMA-7, linc-BMS1-3, linc-C1orf86, linc-CASP10-1, linc-SYNPO2-2, linc-FAM71F2-1, linc-TNKS-3, linc-MMADHC-3, linc-LEPROTL1-6, linc-BCL2L10, linc-OR5AU1, linc-SH3BGRL2-1, linc-TRIM43B-2, linc-ALG2-5, linc-C8orf79-2, linc-CEBPB-1, linc-RPS14, linc-RRP12, linc-FAM98A-3, linc-TACC3, linc-MPPE1-4, linc-IDH3B-1, linc-C8orf79-4, linc-DEFB105B-3, linc-HSF2-1, linc-EPT1, linc-RPGRIP1-3, linc-MUC20-1, linc-MAGI2-3, linc-SNTG2-3, linc-DEFB105B-2, linc-TCP10-4, linc-NAV3-1, linc-CSTB-6, linc-TCF7L2-3, linc-SPNS3, linc-FURIN, linc-HNRNPA1-3, linc-C1orf63, linc-SPAST-2, linc-EGFL7-1, linc-THBS2-3, linc-FRMPD1, linc-ITGB2-3, linc-TRIP11, linc-FER-1, linc-TMEM132D-1, linc-C14orf4-2, linc-GPATCH2-9, linc-ZNF236-4, linc-TTLL7-2, linc-APBA2-3, linc-ZNF32-5, linc-ALDH1A3-1, linc-GBP5-2, linc-DYNC1I1-2, linc-NR2F2-3, linc-B3GAT2-4, linc-CEP57-3, linc-CPPED1-3, linc-PHYHIPL, linc-C9orf170-1, linc-SPACA3, linc-FAM103A1, linc-INHBB, linc-ANKRD20A1-2, linc-CRP, linc-CPEB2-16, linc-PLCH2, linc-SHISA6-1, linc-ODZ3-5, linc-C1orf43-2, linc-HIST1H2A1-1, linc-BEND7-1, linc-CTSD-3, linc-RBKS-1, linc-PRSS38, linc-HAAO-6, linc-SLC5A9-4, linc-ZEB2-7, linc-FAM75A6-7, linc-DCT-2, linc-LY75, linc-DKK3-3, linc-TRPM5, linc-USPL1-1, linc-TPT1-2, linc-OBP2B, linc-C5orf38-4, linc-MMEL1-3, linc-GALNTL5-3, linc-ZDHHC6-2, linc-C5orf38-5, linc-HAAO-4, linc-CXorf36-3, linc-WDTC1, linc-LOC100129335-2, linc-DYNC2H1-4, linc-PEPD-1, linc-HDDC2-4, linc-TPT1-1, linc-USP16-5, linc-PICK1, linc-RHOXF1-3, linc-OXCT1-1, linc-BOD1-2, linc-ARHGEF37-2, linc-AQPEP, linc-PABPC4L-1, linc-MAP1LC3B-5, linc-TOX3-2, linc-FRMD6-2, linc-DEK-6, linc-ZFP64-5, linc-PRKAA2-8, linc-ABCA5-7, or linc-PRKACG-2.

14. The method of claim 1, wherein the DNMT1-associated RNA includes at least one of linc-AP2B1-2, linc-UTRN, linc-GPR65-6, linc-EGFL7-1, linc-ZNF404, linc-FRG1-5, linc-BCL2L10, linc-GIMAP8-1, linc-MAGI2-3, linc-DEFB105B-2, linc-C1orf43-2, linc-RGMA-7, linc-SHISA6-1, linc-SYT4-1, linc-GRPEL1-1, linc-ZNF583-1, linc-ZEB2-7, linc-GPATCH2-9, linc-ARHGEF37-2, or linc-GTPBP8.

15. The method of claim 10, wherein the agent comprises DNMT1-associated RNA that is under expressed in the cancer cells compared to normal cells.

16. The method of claim 10, wherein the agent comprises an expression vector that encodes the DNMT1-associated RNA.

17-61. (canceled)

The application's sequence listing, which the Patent Office published only in electronic form, follows.

SEQUENCE LISTING (542 sequences)

SEQ ID NO: 1 - DNA, 473 bp, Homo sapiens
attctctccatagaaacttaaatcctcagggtgatacaactcagtccttctactgcagcagctcttttataaatgcctcccaaagctccaagaaggaacaaagaatgtgaccagtaagctcacaccatgagtctatattgcagaatatagactttgttcaacaaaactgcagatgctctgttgaatccactggagattgtcctgatactaaggacaagtatctgctcctatcagtgacaaatcagcgtattagaacatgtatgctggctgatcattctgatcaagtcaacaagcttcacaacttactcaatgaggtcgtccgtgagaacttcactgttttaccaggacaggagctacttctttgctgaactgcatcacggtttcaactgctgaggttttcttcaagcttttgcattgtttggaatgtgaaaggcacggctgagacacacttcggcattcccactgcattgtta

SEQ ID NO: 2 - DNA, 516 bp, Homo sapiens
gcaagccgcccgctcgcgggggagccatggcgagaggccgcgcggcggcgcccgcaacagtgcccgcgtccgcagcagcgcccccgcccgccgccccggggcccacccggccgccgcccccgcgcgccccgagcccttgacgcccgcgcgcctcaagcgaggcgtcccccagagtggggccgcgcgcgggagagccggagcgcagccttagcgtccccgagagtctcgaacgccccgacgacccccgcgtctcggaaccccggactccgagcccaggagcgccagagcggcaggcgggcagcaggaggcggcggcgccagagcggagcccccgcgagtgcccccgtgccgcccggccggctgcagcggagggaaccgaagccgccgggcggccggggccgggccgagaacgacgcggaggaagcccccaccgaggccccccggcaccgcgcctgctgccgggttgcgctccgtgcacctcttgcggactctctgcctcattccttgaagactggga

SEQ ID NO: 3 - DNA, 534 bp, Homo sapiens
cgaggagtgggctagtctcccgggtcggtcaccgctgaactctcagagacaatcaagctttcgatgatcatgtgatgaggtttccagtcagttccaggtgaagacaccactggccatcaagaagctaccctctccccaccagacagagcaggatgagagttctataatcctcaataggaggaagcactcaattgaacaagtgcaggaaccagctggctgcctcagcactgacagaagcaaattccatttgcttggacccactgcattccatcccttgtggaagagagcatgtaagcaagacaggaccttcaggcctctgaaaaaaaaaggatcaaagaactgaaactcaccagatcacctcaccagatgctggacccctcattcaccatgtttgcttccttgcctctccctagttcttattttcttacacattgttacatttcttccctgctatatcaacccctagttctagtcagtcatggagatggatttgagactgatctcccatcccctcagctacaccacctgattaaa

SEQ ID NO: 4 - DNA, 886 bp, Homo sapiens
cggaggcgagccccttcccggggggtgggggcggcaacgcgcgacccagcggtcctgcgccccaccctccctcctccgcctccagcgctcggctccaacaaaggggcaggcccgcagcggggaggaggaggaggagccgccgaaggagcgagcctctctcgcgcacaaagttgtggagtcgtttttcctcggagcagggaagcgggcagcagcagccggccgcgggctttctcccgccgaggggcgaggaggagcctctggctccagaagccgattggggaatcacggggagcggcgccccccttcttttgggtcatttctgcaaacggaaaactctgtagcgtttggcaaagttggtgcctgcgcgccccttccaggtttgcgctttgactgttttgtttttggcggaactaccaggcaggaagattgcacaagtaaggggcgttttcagtcgggtgtcaatttctctttctttctttctttttttaaaatttcggttcgtgtctgcttctccaagctttatttttttttttaaatacatcgcaccaccaaactaacactcgcacacacccccgcggttactccgtgtcaaactcctagaggagcccttggccagctcggggtgcggcggtggcgaccggcaggcgaggaggcccgcgggcagcaggtgtggaagacggagggtcacactgggatgcattgttcgtggtgaaactttgattctgtctcctgagaaccaaagattctgcatttggcaattagaaggagtcatcctttgccttaagtgtactcaaattcctctggccattaatggcaagtaacctcagtggctatcactatttaaatagccttctgttattcttctttctccccattttcctctgta

SEQ ID NO: 5 - DNA, 2511 bp, Homo sapiens
agaaaagaggacagagtcattttgctcagaagaaacagcatgtgcaaatgtgccacaaccattcaaagcaagttgctgcttaagtcttgcccacaacttttcatctgaaaagtggagtagctgaagcagccaatgctggtggttataattcttgaggatgcaacagtaagaacggaaaggaaataacccccgaagcctttgcaactaaggacatgtatccttcagacaagtgtttactgggcaacttcttcgtgctgtaattgagtgtggccgattgctcacaaagatgtttgcaaaatccctcctgtcccctaactcacttctccttgcagtgtcactctgccaacttctcctgtcgattggtgaagactgtttctcctcccccttgaatatgggctgggcttgtaacttgcttgaccaatagaatgcagagaaatgaaatgcagccttcaacattcaaggctatgctcaaggagtctaaccctgtggatatgctgttgtcaaatgagggagcttcgattagcctgttgaagacacacagacgacccgacaggcaataccaacattcagatatgcaagttatgctgtcttagaccatgctgcccaggtgaacttttagacgactgcaatttgtgagtgactctaggcaagaccagaagaaacttctagctaaatctaaaccaaatgccaactcagaattgtaagcaaataaaacggttgttgtttaaagacactaacttttggggtgttttgccacacctcaatacataactgttacactaattatttttcattgtgaaatcttcagcgtcttattctgtaatcaaaccagaatgtccttgccttcttagcactttgccacagtccagtggggtgaatagacagcagctgctcatttatgctcatgctcatgttcataatttgcatttggactaaaaggagctctgttctccaggacagaactattctaaagctcttcaggaacaggaacaggagtccatcacagacagcgaaatcaaaagcgccctacatagaggcatccagactgagagctgaaagggatctgggaaatcatttagtctcactccctcattttccattcagaccacagggatgaaagaacttgctgaagttctcacagctctgtagtggcacagtcagaacaaggatcccaatctcctaactactaacataaaatgctttcagcatgcaagttgagcatacaatgggacagtttaaatttaaatggtgttttgagcaaggggagagtctaattaattacttcaaagtataattttggagtcaccagaaaggcgttaaagacaaaaaaatgctttggaacctaggtgcttcatatctgaaattggggcaggtacaggtgtattcctaccactaaagggtcattagttggttgggtagtcctttagtgttcttggtactaagcacaaaacatgggtaagatggttcaaggctggttgtggtggctcatgcctatagccccagcattttaggaggccaaggctggaggatagcttgagcccaggaattcgagacaagcctgggcaatatcgcaagaccttgtctctacaaataataatttcttaagaattggctgggcatggtggcacacacctgtaggctatttgagaggttgaggtgggaggattgctttagtgtgggaggctgaggctgcaatgaggtgatcacactatggtactacagcctgagaaacagtgtaagatcctgcctcaaaaaaaaaaagtttatgttctcaaagtgctcataatctagtggtagtacagtatttgagatattagagcagtttctcctccttttgcaactaaggacatgtatctttaaagcagaaggaatggcagagtcgtgtaataaaccctcaagtaccattacttagcttcaacaactatcgacactctactgttcttgtttcatttatgcctcacctccttcccatcccccacttgaatattctcatcctttttttttacagtttttaagataacaattacataactgaaatgcacaaatcttagctgtacagttttgacatatggatacacctgtgtaaccaatgactgtatcacaacatagagcatttcatctccccagcaagatccatgtgtcttttcctagttaatgcctctttatttctgagatggttattgctctgcttttgtttttcatgttaggctagtcttgcctgttctagaatttcatataactgagaacatacagaatgtactcactagtagtgtctgactttttcacaaaggataatgtctgtggtattcattcatgctgttgtatgcatcagtagtttattttctttttactattaagtagtgttctaaggactattttaatagcatcccacaaagggggtatgatatgttctatttacattattatttggtttgtaatattttatattttctcttgtgatttctcctttcactcatgaattattataataaattttttaaagtgtattat

SEQ ID NO: 6 - DNA, 298 bp, Homo sapiens
ctcattataaacatctatgaagtcttgctcttttatccacggggatactgcttgaggataaatccccggagcttctagctgtgaactgcgggattctggttgctgatgccagccacgcggagtagtccctacatttggaatcccagcttgaataaactctctgtgaaagacttggagggccttgagtctgcaaggtgcttttttttctgaagctttggtagtgtaactgtaagagtcctggaattggaaaagcaaatccagaagttgagttccatgacttttttgctgtttgcctttg

SEQ ID NO: 7 - DNA, 483 bp, Homo sapiens
agctcctgagggcaaagcctgggcctcatcctcttgtggatccaggagagcagtcgctgaagagaaagaggaagaaaaggagtggctagaaaagaaagtttatttccactgcaggaagcactgcctcccatctgagaaatgtcccaagcaggaatcagtgctgcgatgaacttatgagtgaatgcatcaaaaagaccaagttgaacttatgagcgaatgcatcaaaaagaccaagacttgatcccttgcccacaaagatacaaggctgaggacaaagccatgaaggaaaagcctcactgaagaagaggaacctaagagaagcaggttctgctctgatgaactcccataaaggcattcccataaaggtgtgggcctgagtgataatctagatatggtacagttgacatcaggtatatggcggcagccagaaattcaactttgtccatcagctctctgcacaacaggaaagatggtgaccttcca

SEQ ID NO: 8 - DNA, 700 bp, Homo sapiens
gtggcttctgcctccattctgacttccaaatctcttgcaaatgcatataattggttgaacctaattcacagttagaaccccagctgcaagtgagactggaaaaatggctctcagagttcccgcctctgcagtagaggaagacactccagaaggagttgagaatgggtgctgagtgcctcttcaggatgtctgtcacacctcaggaaacctgccaggaataccaaagggagtgaaaaatccaaggaatacttgtcattgaaattagggcccacctggataatccatgatgatctcatctcaagatccttaacttaatgacatctgcagagactggtttatcaaataagggactgtggctatatcgctgacctcaagaaaacctgcggacaaaatctgctaaagaagtatcagcatctatttcaaaagttagccattattttaagaagactgtgctggaagacgggtatttaacacaaacagatgcaaaagatacggggtttcaccgtgttgaccagactgattttgaacttctgggctcaatcagtccacctgcctcggcctcccaaagtgctgagattataggtgtgagcccctgcgcctggccagggatgccgttcttcactctccaggtggaaacaaagttaaacagatttctctacggcagcaggactcagagcttttttgaattgtctgacgggca

SEQ ID NO: 9 - DNA, 690 bp, Homo sapiens
tttgagatgtgacatgaaagaaaataacagaaatgatttttccatcccatcctcagggaccagtgggaatgaattttaccatcccaccctcaagggccagattggaagtgatattggtggaagacaacattttgccgcttggaattctcacctccacaccaaagaagtactgtttttgtcatttgcaccagcttctttctccaggaaagatcaaaacgatgcactgcaagtgtgattggtccagatagctgccttatccaactgcctcctttggaccacttcatcatgggacagcttgatgcaatctacttgacaagaccctggaaccccacacccctcatggaaccagtgtccacctcccagtcacagtgtgaccccagggaactcttgcctgcttgctttaaacccaccacttaaaagtctccacagaaaacctgtttgaatagtacccttgacccaataagggcattggcccctgggtgtctctctctctctctctctctctctctccctctctctccctctctctctctcgctccctgacctctgcgtgtggactccaggcatgccatatacccctcaggacctatggcttcagaggttattagcacatctgtttgagatatgcacagttttacatttgtcccttaggtaatcaacagggctgagatcagtaaatcacatgtaagc

SEQ ID NO: 10 - DNA, 245 bp, Homo sapiens
ctcatggtacacagtgtataggatggactggagagaaggcaagggaagctggagtttctagaggcaggaaggttagtttagagggtatgaacatgatttgccaaagaggtaataaggtttggactacatttatgtcagcaaagaggagaggacagattaattcattcaataagtgattgagtagatacctactggtgtcaggcattgttctaggcactgggaatacagcagcaaacaaaatagat

SEQ ID NO: 11 - DNA, 835 bp, Homo sapiens
attaattctttaaaattatcaaattatacataacataatttgccattttttccatttttttccagacagaagtaacttctaaaacattgctagggaaacgctctgacatcttccgtagaggtgaaaaagcacaggtctgactcaggtagctgcgagttcaagttcagccgcaggctcttccccaaggtgctggtcttcgcaggaaccccttgcaggcagctgcaaagagcagcacggcgcgcacacacagggtccggctggcgtctggccagagcaagggaacagtaagtgtgtcctggaggcgctcgccatgcactcacacgccatctgtggattcggaagtgacctccccctcggttgatgagggttctctgcgtctggagaacacaggacgtccacaggaaagttctccctcctgcactcccggctggctctgaaaattatgaactctcttttccttaaaataaaggctctaaaattgtgtgattccacctccctgaggctaagcgaaagagccgcgtctgcccctgtccttcccgggggctggcagggagtgggtgcccggcggtgactcagccctgcagcctcccagcccttccccgtatgcgggcaggtgatgcggacgcctccgaccctcgtggggtttgtggagagcgttgatcagcgctgccgtcagaacaggacctgtgcgaggcctcgcagatgccgggagccgggcggtgctctcggtgcttctcatcaaatccactggctcttcgagaggaagcacatgtcacagcccagctcaaacaagaagcaagaaaatcactcttcattttggaattgtaaaataaag

SEQ ID NO: 12 - DNA, 586 bp, Homo sapiens
agacagagaaaaagagaaaacaacaacaaaaatgaagcaagagtaaactgccaactccaactgcctttctggaaggcctaatttgaagatgtctgaaattctgtatcactggctcccagacatatcatgtttatttgtacatcacacctttgcccacctctgctcagtggacctccagcctaaaatgcctcccttgttcctctgtctcacttcagctgttattgaagtctcctggtacaatgtgacatttccagcgtcttgttttccaatcagatcagtggctctcagtggaccaactgataaggaacatttggaaaatgttacgatgattgagggctgtactggtatttggtgggcagggaatgacaatgtcctgtgatgtatccatcataatggaaaattatctgatgtcttgggcaaataacagcagtcctgccagacaaaatgaaggtgaaaaattcatttataattgcctaagttcagagcttctctctgttttacatacaagtacaagaaatgtttggcacagttttaatgtatactgaattataggaatccaattacaatatattttgcttaacataga

SEQ ID NO: 13 - DNA, 2321 bp, Homo sapiens
aatcactaatgacctcatcttcaaatggtcagtgataataaacaagaaggagggatttccaagggagcagagcattaataagctacttgtgcaagaagctacaatgagaaaaaaaatagcaagaaatagatgagggaaggaggttctgtagagggaaaaacaaagagagaaaaggagaatgaattgtgctgagaaagagatgcctggatgaagaagctggccctagcacccataaagctggaaagaaagtggggccttggaaacttctggaaggatgcgaggaaagaaaaatgcaaggaaatgagatggagaggagaaagagaaaccaggaagcacttcggaagcatgtaaattacaaggaaatgaggaacagcctttattgaaacagtctgtgaagtctgtgctagcgctgagagcttcattttactgtcctggcaaggaggtgtggcccctctccagtgcccagcacctcatcgctgtggtaacagaagacacgcttatcttccggattttgcctcagagacttgggctgtacaagctgctttcctggggtggcttgtccttttgcagttaaccgagatgcctggggagaagagcttcccccaacaggatggcaggcgatgcttccagatgcggtcacttggcacgtctgagccgaatgtctccataaaaatatgatgtaattaacagagccgcagcagctggaacaattcagcacctcacattgattttccatgtctcctatttactttcagtttttaaactgtctgcagtgacaggaaatcaaagaattataatggtgtgtgtgagggcccaatgctgggtcggcatttccttgtgaaatcctgagattaatcagtttcctatcactcaatcatcccttttcacttctaaaggaaaactgtcctcccaaatgctacgaaatagcagtctatttttggatattaaaaaaatcaattgtattattttaaaatttgagaggagtgtttttaaaaaaagtcagcccgaagcaatattcacttatctgttttcccattcaagtttaataggagttggcaaaggcatttgggtgcagtgagacacaagtactatattcacccttcccaagttttgagagcttggaaaagttacttggtggaaccaaagagaggaactgcattccaagtttttttgatcactgaaatgaaggaaaataagtttccccatatgtggttattcatgagccttcatctgaagctggtggttttctcatagttggtcactgtatttccagctctgtcaggtgaaagtcagaatcttgggttaatttcactttgggttccttaaaatgctggagaaaataggcagctgcggttgtagtggggaaacaggcctctgtctgaagtcagcttgctctagattgtgtttgaaaacatgcctcagatttaagtggtcttgctttttttccagactcccttgccttggcagattctgtgtcttggccatactgtaagaactcacttttctttgtctttttattgattcaagcaatataaccatttcataaataattaggaaaataaagaagaaaatttctcataattctactgctcaaacgcaatagctatgattgctttggagcaattgctttgggtcattttcaaatgctgagttttggtatgattctaagcataatgtacaaacaactttacatgttgctttttcacttaatctatgtcagaagcatctccccaagttatgattagcttcagtaattatctttttaattgctgcccaaacagctggaacaattcagtccctcttattgactttccatgtgtcctatggaagtagagacagtctattaactatttctgtattttgggacaatagatcaaattcatttttcactgtaattaatcccatgataagtatctttataaataagccttttctatatataagataatttctttaggataaattcctagaaattacagggtcaaagtggatacatattttatgactcttgatatttcttattgacctttaaagctattatgtgactttatattatcacctaaaatgtttgaggaattcatgctttacgagcgtattttattgactaaatatgcagtactgagagagctttatgtgtgcagtttgatgatgctgacagatatcccggagataaacattttttaatttaaagatgttctgtttatgtttaacatacagaagttaatgttaaacatgatgcctattttgtttaacatacagaagtgactgtattaaagccatttcttctaaatgtgcaataaactatgaattctttgcctggt

SEQ ID NO: 14 - DNA, 1118 bp, Homo sapiens
gggtcaccctcgagctctagatctttttccggtgtccgagctgctgtagcccctacgtggtgagtagatcgtctccacagaaatcagcggaggcttccacagtccctggttggaatggaaccggcggtgaggatgagaggcgctgaagaccagaagacccagggcgtgaacggggcgtgtcatccctggagtttcagtagaatttcaggcctgtctgcttgagcagcagaggaggagtttctgtgtgcctgtgagagactgtgtgtgtgtgtgtgtgtgtgtgtgtgtgtgagatgaatgaacagggttgtgtacgtgtgtgtgcgttagacaaatgaacagtgttgtgtacctgtgtgaattgtcactgtgactccaggctctaggctctgcagattcctcagccctatcgcctcacagacacttgggatgtgcagcaggtaaaagagagaagccagattcatggaggcgtgaaggatcccagcaagaaaacacagacttgatcttgagacgagatttttgaaattggttgcggcctcaaggcaggctctgagaagactcgataaagagttctcaggaataggcatccctcctggatatttcccccttggaagcgccgaggagccagctctatgtttgtaaccatagcatttctaaagctccagccccaggaacctgctgtgaattagagacagattccaccctaggcatcactgatcttggcctctcttgtattgggaaggtcaacactgttccagtttctctcctactcccatctggttgtgctcggtgaagtagtgctacccttctgttaaaaaaaaaaaaaaaaaaaagatcctgaaagaggaaagaatttttgctacacatctgaaagctaaagtccaggtgatgccttgattacctagctttggcttctctgaactctgcttctctgatagaggaaacctgaagagaactagcatttctgaaaccatggcccgggtgagttgatgtctcttttgcttttctgacttattgtgattttttaattcatgtaatattttcatttttttaatcctgaaacctcctatctcagaaagctctctcttggaacctatttcacattcctcccattccag

SEQ ID NO: 15 - DNA, 706 bp, Homo sapiens
cgctggtcgaatgttcccagaaacttccctgcattagctctaccgggcgcggggagcagaaagcgcatttcctgagtcctgaaaagcgcgtgcgcgcctgtgtgctgccggcgtttgggcgcgcctgcttgtagtttgctctgtcgcccaggatggagtgcagtgcagtggcgcgatcctgcaacctccgcctctcgagttcaagcgattctcctgcctcagcctcccgagtagctgggattacagacgcgcgccaccccacccagatgatctttttaaatgcaaaatgccatcgacgcagaaaatcaaagaatcagcttaagttccagaaaaaagaaaaaccaaccaaatgaacaataagacaacaacaacaacaacaaaaaaggccttttgggattttggatgatattgcatcaaatccatacattaacctgagagacgagcgacttcttcaacattgagccttccaatcatgattttcaattcatttaggtcttctgtaatgtttcttaatataattgtatttgttgctatgcagaagtttcactgatcttttattatatctctatatatatttgatatttctgacactattgtaaatagtatctttttaatatttcattttccttttttgttgcttaaatatatataaaataagctaattttccaaactaatttttatatccagcaaccctgctaaaatttc

SEQ ID NO: 16 - DNA, 473 bp, Homo sapiens
agatgaagactttcccctgaaggttatttctaatggccctcaaaataggctgaatgaaaagaggtgtgatcgatgaaaactggccgctccttctttgcaactccttccattaggtggtggagtctacgttgccctccctttgatccaggctggccacacaaattactttcaccaacagaatgctgtagaagtgatactgcatgacctctgagcccaggccttaagggactttgcagcttctgttcttggcctctggctgctctgtgactaccatggaaggagttccacactaacctcctgtagggtaagagacacgtggaggcagactgagcctcccagccatcccactgaggctccaggcgtgccagtgatgtacctggctgaagcctggcccccagtcacccactgacggcagctgcaaaggtgcccgtgatgagaataagatatcactggccagggaccacttctctgaa

SEQ ID NO: 17 - DNA, 363 bp, Homo sapiens
cacatgttacagggaagcactgtcctacatcatatgtgacaggctctcatagtcaccatcatcacgggaatcttgcacatgttacagggaagcactgtcctacatcgtatgtgacaggctctcataatcaccatcatcatgtgatcttgtgcatgttacagggaagcactgttctacatcgtaggtgacagggtctcatagtcactatcatcacgggaatattgtgcatgttacagggaagcactgtcctacatcgtatctgacaggctctcatagtcaccgtcatcacgggaatcttgtgcatgttacagggaagcactgtcctacatcgtatctgacaggctctcatagtcaccatcatca

SEQ ID NO: 18 - DNA, 1758 bp, Homo sapiens
ggcatagcgagagataaataggattcaggcagtgctgtccttacatcgcaatcattcaggctccttggattagagaccatcctgaggacatccttgggagccatgtgctgaagatggccaagccacaggatgaaaggagctgcatctttgagtcaccactggagaaaggtctctctaaatggatttgcagagacgtcttctcgaatactccccttctaagttccacttgtaatccacttcttctattctcccagcaatcaatgtggtttggggaaattccagaatctcataataccttggtcatgggtaaataaggaaaggacctttacatacatgtgatgcaaagcagatcaaaacaagcagagcagcctaagagcagcaagaccccaaaggataagggaagtcctgcagaagagcagagcggtgctgcaaaggcaggcaggtaaggtaagcagacagggccatcaggatggatcctttgggcatgccagcatccaccagggactggtagagctatttagagaaactgataaaaagctctgccaactacagtcacaaaagatggagctcagaatgatgagtagatgcctaaaacatctccattttgttgatgaagaaagtaaagtttatagagcttagattatttgcttttgtacctagcacagtacttagtttatagtagatgcacaataagtatttgtttaatgagtgaatgagtcactagcctaagacctttaatataacatgcttaaacctgctaccagggattgggaactcacctatttagtagtgagtagaggggtgtggtactggtacttaagacagatgcattgtggttgggtatggtgtgtttttgtttttgttttgagacaggttctccctctgttgcccaggctgagatgcagtggcattatcatggctcactgcagccttaacctcccggggctcaagcgatcctcccacctcagcctctgagtagctgggaccacaggtacgcatcaccgtgcctggctaattttgttttttgtttgtttgttttgtagggacgggattttgccatgttgcccaggttggtctcgaactcctgggctcaagctacacccgcccgcctcggcctcccaaagttgtaggattaaggtgtgagccactgtgtccagcagatataatgtttttaaaagtttgagagttaatatgctctctggtgtgccctaggtcccactactcctattgccttaaaactcacgcagtacacatttgtcttccatgggcttcagttgtaagagaaccctttctactctttgctgttcacaagtctccttttaaacagagcttgttcccaatgctgttttgttttgccctctgccatgttcttccggccatcacctcctgtggggaaaagagagagagatcacattgttactgtgtctgtgtagaaagaagtagacataggagactccattttgttctgtactaagaaaaattcttctgccttgagatgctgttaatctaaccctagccccaaccctgtgctccctgagacatatgctgtgtcaactcagggttaaatggattaagggctgtgcaagatgtgctttgttaaagaaatgcttgaaggcagcatgctcgttaagagtcatctccactccctaatctcaagtactcagggacacaaaacactgaggaaggccacagggacctctgcctaggaaagccaggtattgtccaaggtttctccccatgtgatagtctgaaatgtgg

SEQ ID NO: 19 - DNA, 1346 bp, Homo sapiens
ggcgggccggaccgggccggcggaggggagcggaagcccaccggggctggcccgccgctgacccgccgcctccgtctgcctcctcccgggctctgggcccagcgcgcccagatgccgggcaggacccctccgcccgctgctggaacaccaatagcagcgttggagcctctgggccggaggaactggggcctccaccgacacctgcttcttccctcacctcgcagccttccacacctgttgatctgacctctgccccgctgccgcccaggagtaacctaaggcttttggcctgattcgagctcactccgtctaaacctctaaatgcggtgcgaaaaaatcctggggaatgtgccatgcaaagcctgggcatttcaagtgcttttctggattcgcatcaactcctctttacaggcatctttatccggaattcagctcgtcccaaaccccacgtggtgtagctctgcttgtgtttttgaatcccggggcctctttgaatcagaagccctttgtatagagataagtatcctttaggccagaatcagcctccatttttttcgcagtcccatttcctacccgtaatactttcttctgattttaaagccatttgatagagaagggacagggaacagaaccttcgccccccgcctgagcagctggtagactagatatcttccaaacattatctcatttacttccctggagttacaaataggtagatttcatgtccgttgaggggtgagaaagctgaaactttgagacttaagaatcctggccgaggtcagcctcctccgaagcttcatctcttgccaccactttctggtgcacacctaggacagatttcaatccctgagatcccaggatgaaacctatgtttgccaaataccagctactgtgccagaagagatcatggaaccaggtgtggaaagctgcttgagaagaggagccaaaacatcatagttgaaccgtcctggaatagaaactcgccctgaattctttcttgtgtgaaatccaagagccctctcttggggttggatcgggaccctgttcctgtaacaagtccacaatgccagagaattaaagagaaccacaaagttcctgttatcgtgctttgaggtgcactgaactgcagcaaacccaggggatccaaggctacgttgaaaagcctttgaccacagtgcagggagcagaagacattaatgacgtgatgtcgacacagcccgcactcaggatcctccaggaaaagaacacagagataaccccggatcgatggtactttttgaaaatgctttattgcaaaagagtggctagggttttacaagggctatgaagaaacatattaaggttaa

SEQ ID NO: 20 - DNA, 2160 bp, Homo sapiens
gtcggggcgaggaagctgccggggaagtgagatgacggtcgcgggggtgcccaggagccctgaaaaacttgtgccctgggcacggcaaaatctgcaggttgcagaaagtctcaactgatcctggcataccccgaggtgccgacttttagagctgaagatgcaagaaagattgggatcctgcgatgcaccgaacctgtctctcgaagtgtgtgcgccctgcttcctgtgttaaacaatttgctacaaggtcacacaattttaactagaagactgagatgtgaacctgggtggtctgatgtgaacaccactgtctggtaatcccaacgctctgctgctttgcgacagagaatgttttagggaacacacagactatgtacttaaccaaatctggaatttgccgtaagatattaatcagagaagtaatgatacttgcattttaaaatgaaggctttggcagtaggagaagggtgaataagaggcttaagagcctgaagggagaaatgccaatgatacaattatccagcaagaaataatcagaagttgaagtaaggcaatgatggtagggatggaatataaaaaagctgtacccctatctgacatctttattgggggaacccgcccccaatatttcaacgtaggttctttctattttccataagtgttggccagctgagaaataaagagagacagtataaagagaggaattttacagctgagccaccgggggtgacatcacatatcggtaggaccatgatgcccgcctgagtctcagaccagcaagtttttattaagggtttcaaaaggggagggggtgtaagaacagggagtaggtacaaaagtacaaagatcacatgcttcaaaaggcaaaaagaccttactactagtaagggtctaacaaagatcacatgcttctgagggaacaggacaaagggcaaaagcagaactacttataagagtccaacaaagatcacaaggcaaagggcaaaagcagagctactgataagggtctatgttcagcagtgcacatattgtcttaataaacatcttaaataacagaaaacagggttcaagagcagagaactggtgtgaccacaaatttaccagggcggagtttttccccaccctagtaagcctgagggtactgcaggagaccagggcgtatctcagtccttatctcaaccgcgtaagacagacattcccagagcggctgtttatagacctccccacaggaatgcattcctttcccagggtattaatatttatattccttgctagtaaaagaatttagcaatatctctcctacttgcacatccatttataggctctctgcaagaagaaaaatatggctgtttttgcccaaccccacaggcagtcagaccttatggttgtcttcctttgttccctaaaaattgctgttattctgttcttattcaaggtgcactgatttcatattgttcaaacacagatgttttacaatcaacttgtacagttaacacaattatcacagtggtcctgaggtgatgtacatcctcagcttacgaagataacaggattaagagattaaagtaaagacaggcataagaaattataaaagtattatttgggaactgataaatgtccatgaaatcttcacaatttatgttcctctgccgtggctccagccggtccctccgttcggggtccctgacttcccgcaacacatcttagattcttattacagaaacttaacattcccagaagaagcctcgcctttttatttctaattttggctatgaattcctagctatgacccatttgccccattctaactatttccagtggtagggggaaaagaacaagacagtaatataatgtagagatgagctaattgtggtaataataagcacttgtgtagtgctttcatatacatgatctctcttaatgttcataacaaagctgtgaggttggtgctcttatctctctttggttaatgaaggactgaggcctagggaattggaagtgacctgccaagatgacagaacaataaagtggcagagttgggttaaatccttggttattttaatgacaaatgacagaccaataattgattcctcaataaaacagtggaagtcagaaagagtagaattgtacattcagaatgctggcagaaaataaccatca

SEQ ID NO: 21 - DNA, 564 bp, Homo sapiens
tggtctcactcccacagtgcctcccctaacagcaccaaatctgtttccaggcagtgggcaagcagggctgagaattgccccagactacccacctcccagctgcaaaggaaaagggctcagttcttcccccacctgtggagtctgcatgctggattcccgttctccccagagttctggccaggaggcttcttgcctggttcaaattgttatgaagttcagctggagacttccttctccctgtggcattttccccacacctctagctgccctcctgaaggatcctggtggtgccagttgttctggagctaaaattcatgatgtgagcctccgtatgctgctctgtctgtccaagtcggagctgcaatctggttctgcctcctgtctgccgtggtgatccctgttgtagtttctgtgtgtcttcttttgagaaatgccttgcgccctcccgctcttccaggataactcagggcctccatctcctcctttgaaaactccgttcctccccttcacctccacctgattattcatgtcgtgaagaaactggtctacttgtcctgtagaatc

SEQ ID NO: 22 - DNA, 1761 bp, Homo sapiens
gagcgagactctgactcaaaaaaacaaagaaaaaaaaaaagaaaaacaaaggtttttaaaggaaaaaatgaggaggattacataatggttttgaaataattatccttggctacaaatatcaataacaaaggtcacaccagtccgaggttggacaggcagttgctaggcagatgtctttgcagaagtaatttttgtgtgaggttgcagcagcctatgtgcaaggttgtaatttttgcagaatcttttgtgatcatttttggtattaggcatacaagcatgagaatcccctcttcatggcctccccagctctatttgtcatggtttgtttttttaaaacactagtgactctatttgaattctaacaactttcacattcccaacacaaatgatagacatttaagggattaatatgctaattaccctgatcattacacattgtatacatgtatcaaaataacacactgtaccccataaatacatacaattatgtgtcaattaaagatcattatttttaaaaataggaccagaaaaaaagatgcagaccctctagtaaggagatgggatcaggagtgattccatggttaatttaacccacataaacaactaatcgtaagtatggtatgagcgtttatgtaaagactgtgacaacaggaaatgtctgtctttgaacccaaggttatctaaccagcacaccaatggtgaaagattaactttgtcagaaaccaggaaccatgaagcagaggtcactgtttccaacctgtgtgttttccacgtggatgaatcgatgaacaaaatatggcgcatccacagaatggaatacaaagaaagaaagcgtggacacatgctgcaacatggatgaaccttgaaaatattgtgccaggggaaagaaaccagagacaaagagccacatgttgtaggattccatgtatatgaaaggtcctaataagcaaactcataaagacaaaaagcagattggtggtcacttagggctagggtgaggagtgacggttagtgggcactgagtttctccggggggaactgaattagatggtggtgattgcacaattctgtgaatagactaaaaaccactggactgtaagagggtgaattttttggtatatgaattacatctcaataaagctgttacttaaaacgtggaaaaaataataagcagtcactagctattctcaataaaacagaaaccacataggtaagaccaatattgtcacattttggttttggctgataatggggcaagtgagcatagtcaccgttgccagaggatttaccatttacaaataaaagtttctgtggagtgacaaccttttactgtgtgccaggtactgtgctaagcactttgtatataccgattcatgtaatccttgtgacagccccgtgatgccccatttttagatggggagattgaggttaggagagttgaataacttgcccatagctgcacagcttccaagttgcagagacaggattttcaccgagtcttattacaaactgcctcatattgtgtggactggaaattctatgttgaggttaatttattcatttgttgtttagttcttttcatcattgttgagttaccaatggcagttccagaggatttatcatttaccccaaagctactgcaaatctaagagaaaacaatgttcttgctgctaaagtttaatgtacaaaaaggtaaaatcatgactgtcttgcaaataaaacatgaacatgtatccaagcttttaactcactgattaataa

SEQ ID NO: 23 - DNA, 393 bp, Homo sapiens
atgggtgttgagcttgaacgctttcttaattggtggctgcttttaggcctactatgggtattaaattttttactctctttacaaggttttttcctagtgtccaaagagctgttcctctttggactaacagttaaatttacaaggggatttagaaggttctgtaggtaaatttaaactgttcttaggtagctcgtctggtttcgggggccttagctttggttctctttgcaaagttatttctagttaattcattatgcaaaaggtacaggggttagtccttgctgtattatgcttggttataatttttcatctttcccttgcggtactatatctattgcgccggtttacaatttctatcgcctatactttatttgggtaaatggtttggttaag

SEQ ID NO: 24 - DNA, 2384 bp, Homo sapiens
gaggaagactggatgccaatgatcctgatctcactctgtcaccaaggctggagtgcagcagcagaatttcagctcactgcaacctcgacttgctgggttcaagggatctcccaagtagctgggactacaggtgcacaccatcatgcctggctaattttttgtagggatggggttttaccatgctgcccaggctggtcttgaacttctgagttcaagcgatcctccctcctgagcctcctaaagtgctgggattacaggtttaaaaaatatcctggactttggaaaatattcttatataaagaagcaaaaagaggatggaatagacttgtgctaacactgaaactccagtcaagttgtaaactgaaaaagaacgtgttgaaacaaggaattgccccatagccttcacaggatctcactctgttgcagtgtcactggagtgcagtggtgcagtcttggcttcctgcaccatctgccttccagaatcaagcaattatccagcttcagcctcccgagtagctgggaccacagacgtgccaccatgcctggcttatttttttattttttgtagagatggggtttcaccattgttgcccaggctgggctcaactcctgagctcaaagtgatccatctgcctcagcctcccaaagtgctggaattacaggctcagtctatactagtatatttacaactatattttattacaatatttattaaatattgttgtcttttgctaggaaacttaaaaaccttaaagaacatcatttgtgagctcccaattggcacaaattacataaggtactctacacatatttttattttcttaactttttgttataacaagtgaaaaatctaaaaatcaactgaataagcttttatgttgaaaagtatacttaaatgattctggtgatcatggtgttctagtaagaaaaatgctttgctagtgatgtgacagcgtacggcatatgaataatatttgaaatcttgctactcttttcttatattctgccccaaacccaaaggaagtttaaaatgagaaaaaaggtaaaggtatgaaagaacctttggtgactcaggtggcttcagacttaccagtcacaaaaacttgcaagcaggttctaggagacttcactgcatccatatatgctgttaatagtgtttttttttttttttgagacggagtctcactctgttgcccaggctagagtgcagtggtgtgatctcggctcggctcgctgcaacctccacctcctgggttcaagtaattcttccacttcagccttacgagtagctgggactataggcacctgccaccatgccaagctaatttttgtatttttagtagagacggggtttcaccatgttggccaggctggtctcaaactcctgacctcaagtgcccactccagcctcccaaagtgctgggattacaggcatgagccaccgcacccggcttgttatagtcttaaaacactctacaccaggggttagtaaacgtttcctataaagggccagatagtaaatattttatgtcactacgcaactctccacggtagcatggaagcagccatagacaatacgtaactgaatgagtgtggtgtgttccggtaacgctttatagacacagaaattcacttaaagtccatataattttcacatgccatgaaatatttactgtttttttttggggggggatggggacagggtctcactgtcactcaggctagagagcagtggcaccatcacggctcagtgtagcctagacctcctgagctcaagtgatcctcctatctctcagcctcctgagtagctgggatcacaggcatgtgccactatgcccagttaatttttgtattttttgtagagatgaggtttcaccatgttgccaaggctggtcttgaactcctgggttcaagcaatccagctgccttggcctcctgaaatgttaggattacaggcgtgagccactgcacccagtgatttaatagatgtaaaaatcattcttagttcttggggcaaataaaacaggcttgcaggccagatttggcctgggaggtatagtgtagactggtccacacgattggagagtcagcaggctcttactctcagacttcctggtggtcctcaccagtctattttacagtggcttctttatttcctttctgccactgttgatgggactgtagcgtcactgcatgtgactgataccaaaagagaaaggttcttttaattaatctttccatactatccagaagatttttttcagttttatttcttaaacatataagagggcattataaaatgacattataattataaaagattttcttttaagaacaatgtttttaggcctactaatattacttaataaaaagagcagatattt

SEQ ID NO: 25 - DNA, 2357 bp, Homo sapiens
attttatattaacatacagatgtatgtattttagttgcattttttttcttaaaatgttattttttctctttttcttttatgtcaggtgatgatagagcccctagggaagcaaaactgtccatgcccttgccttaactttcagatacgataaaaacaacatttataaaatacctgtcttagaaatattagctaaaattatgttggggaaagtatgtttgaaaatagaattgtaagctaccacattgtgataaatattactaaatttgtttattgacttgtcaggaagcaaaagaatgaattaaagaaaactccagagaatgagctgacaacctactccctggtcagtggctctccatgcctacctgtggtctcttggacacccttgcagatgacttcctgggaactcttctgggagtgaatgttatcagcaaattcccaaaacaacaccccttagacaaaaagcctcctcacctatgcattgcctagaccacccactaaaggtgatggccacaaagaggtggatttgttgagttggtgccattccttctactgccagcttcaccaaaacaatgacacagtcttccttccgcatggagactcttctctttcctgtgttgcagtggatgcctcctgcagataagaaatgcttaactgagaaatgctcatgttgggatatcatcgatgagactttaatttgggcatggtgactgtttcccttgctgccacttgactcaatcccaggagcctcagtagaggatataatattacacaagatgctcaaaatggtggaattgctcagtgctcccataaatatacatttataattttcatttgccacatggtaaactgaaaaatacagactatattaaaaagaaactgcatgattttttttcaaaaattcaaagcatatttaaataatatataaattaaatgccctcctctcttccaattctgtccctatagttttcctctattaagtgaactacatgcattcttttagtggatagatgcacacaaacacacaagccattatggggaaggatccacgtgtgtggccatattgtaacacatttttctgcaaatcacctctttcatttaacagcccttattcaatggcctttttctttttcagtagtacatacacatctgtgtcatttgttgaatgacgacatgaatgttttgtagataaaatataattaaatgttttaagcatttctcactcatagatatttatgttagcaccaaatttctgtgcaatgaacctccctatatatcagtaattttgcatttgtctataatatcataataaattacttatcagttgaattactgggattaagtatgtgcacactttatatttatattttgaaaattattgcaagattgccttcaaaaatgtggttaacaactttatcttcaaatggcaatgaatgagattgccagctttcctacagcctcacagacaatggattttataaatatttaacatttttgccaatgtgatcacccaaactattgtcttaaattgtatctcttttgtttttgagtttggtcattttttcatgtttattagccatctgtattttttaatttcttctttatgtccaattttgtgggtgggaggaggatttagtctcttcctgatttcgaagagctcatttactatttcgggaaataagatttggattgtcaaccattatagctattttttacacacttttcaactttgtttttgttataagaatgtgtatgattgttacatgtccaagtataaccatgttcgcttttatggcttctgagtttcatgtcatttttggaaagatatatatattgagtccataaaacccttcacctatgttaaattctaattcttttgtgtttttttaattcaaattcttaaatcatgagaaatttttttgttttgaaatcttaaagttgccaagttacttgccattacttgcgattatttgccaataattgcccatttatctgtaccgccatcttgcgcatatgctgtactctcatctgtgactggctccatttttgttctgtggatttgtgtgtctcttcttctgcctcctgtctcgtgtctgctcgttggaagaaattacagtttagactgcaatttcatcaactttaataaatcaattgaggggagaattggtttttaaaaatattaagtaagtcttcgtatccaaggacaaggtatgtcttttcttattcaataattttaattactgttaatattttcactgtggtgatgggagtttttcttttaatttattttcttgttcattttttgtatctaaagtttttgttttgttttgttttgggggtaagttgtcaccttactgttt

SEQ ID NO: 26 - DNA, 1421 bp, Homo sapiens
tgggacatgaccagtctaagggggcttccagccttgcagaaaagacactgggccagggcagtgaagaaggtgtcagatcagaaaggatgatctctgggtccacaacggccacttccaaggcacctagagagggggaaacagtttgccttccccaggattttctgattgttgaaaaataccatgaactgcctgacacagagcggagcataaatcattggaaaatactcagattctagtggatttactagaacacactgggagtcatggatgaacctggattttaaagctcaacccacagcccgccactctctacttgtgtggtcttggtctatctacaaccttaaagcctcagtattctcctccgtaaattggcggggagcaatatcacccttgcagggtgatggttacggcacaatgaagatcttgaagggcacacagagagagggaaggcaacagaggcaggctttgttggacaccaaatgaatgtactgagccattgttccaagacagctctgtattttaaagctcagcatgggccaaattcaacctctggatgaaatatgtgattcttgtggcattgtcagaagtggcaaatggattctctcctcctaaatgtggtgtgactctcccatcaaccacaggtagcaagtaacggcacacttgccacgacctctactgtctgctttctgtatcactgcctcaatcatgcccctcctcttgccttgtcttggtgaagagtgcctggccagcagccctgcctacctctctcttctggccctagcgccttgctccagcccatgtggttccagcaagctccacttcaaggggcccaccctccagggcatgttccaagcatcaccaaccagagggcttcttctctgagaatttatacatggaccttgaggtcagcaagcaaggatgatataagccagagttctctgcagccatccccttttcacctctctcagttacggatgaacttatctgtaaaatgggaaaaagaaacgacaagagaagcacagctgagagaaacaccaaaagaaagagttgaagacattgtttgaattcctgcatccagtagtgcccaaagccagtgccaaccctggaattcctagctacaagagccaatgaagtcccttttgctttagtttgaggtgggctcctgtcacttgccacagaaactaggagaaagcacagtgtctgtgctgcagtgagagagggctaaagtcctcagggacaaccaataaagcacgagagccaatgaataaatacttgaggtgagcaattacaggaggcattctttacatttcttagagagccaagcaaaatttagccccagttgcctgaagtggccatatatattattattaataatgaatatagtcaataacctgtaggcagctcagaaaaaatctcagtca

SEQ ID NO: 27 - DNA, 2870 bp, Homo sapiens
tttggggaccggtcaccgaatgcgcgtcaaagttcgccgcgtggagggtgaagaaagaggctgcgcctcaagacttccagaaacgtatcctgtgattgcagccagcaggctttctgccgagtccaaacgctatcgagtttttttgggtttggagtcaaaaggagttaaggtgcggcccgtgaaccacgcggtgtaggtggaaattttggactcagcgcctcgttgctggctggtgtctgagcgggtgaatcgtgcctccctggcagtatagacattaccctccttcttgagtagacttttgccgctccccgactatggaccgagtcgttgggataagaatggaggaaaatcaaagatcagagttgtgtagagagggtattcaacgggtggccaactggtagaatcttgtctgataccaaccccgaggctgctctaggcttctttttcatgagtcaaacttgatctctgactaggtgctggtcagtcactcaatctatccaggcctcagtttcctcatttgtaaaatgagattggaccagatggtctcttccagcacttatattctgaagctaacgacagaacaaaggtaccgatgcaagagaacatagggcctgttggtgacactggttgatctaagacatttagacttgtttttggtagcacctgcaaaccgttgacaatttaggaccgagcatgagcatgatcaaggttgtgttttagggaaaataatagggagatagtctagagaggataaaactgaagatgggagaatcacttgagaggctgggacagcgacatacggaggagttgccaggggaagtaaaaaggaggaaattcaagggacaccacagaagagagatagggcacgaagtggccacaacctgcaactgactgggagaggggagcaatggaaggtgagccaggttctcaagactgggttatggcatgcaaggagcagcagactccaaaggagggaagccgtttaggaagactctgcccctatctggataaatgccagcaaacctaggaatcaagaggggattccagactaaagggggcaccccctccttgcagatccactaccaagtgctcaacctgtccaagaaaatgttacatagaagagactaaacaaggacgcatccaatctacacctgtacctagatctgatcaataccattctgatgtctgcatttatttacttgtttatttatttatagagacagggttgggtttcactatgttgcccaggcttgtcttgaactccccagttcaagcggtccacctgcctcagccccccaaggtgctgggattacagtcatgagccaccacctgtactaaaaatacaaaaattagccaagcatggtggcgggcgcctgtggtcccagctactcaagaggctgaagcaggagaatcaattgaacctgggagactgaggtggcaggcagtgagccgagactgtgccactgcgcttcagcctgggcaacagagcgaggctctgtctcaaaataaaataatattctttcattcaacaaagatttgagtgtgagtgcctactgtgtgtcaggcagttttctagttgcttgggtacatctatgagccaatcaaatatctttttttttttttttttttagacagaggctcgctctgttgcacaggctggagtgcagtggtgtgatctcggctcactgcaacctccacctcctgggttccagcaattctcctgccgcagcctcccgagtagctggggttacaggcacagccaccaggccaggctaatttttgtatttttagtagagacaggtttcaccatgttggtcaggctggtcgtgaactcgtgacctcatgatccacccacctcagcctcccaaagtgctgggattataggcgtgagccactgcactcggcaagtatcttaaaaggtggcaaatgctttgaaaaaatagaacaggctggactgggagaaggcccctgaaggagctgccttttggagtgctgtaaaagttatatttcttgatctgaatgataattatacgagtagacgcatatgcaagaattcattgacctgtatgcttaagatttatacattaaaaaataatagaccaggcacgatggctcacacctgtaatcccagcactttgggagatcaaggcaggtggatcatgaggtcaggagttcaagatcagcatggccaagatggtgaaaccctgtctctactaaaaatacaaaaaattagccaggcgtgatggtgggcatctgtaatcccagctactgaggaggctgaggcagataattgcttgaaccctgaaggcagaggttgcagtgagctgagattgccccactgcactccagcctgggcaacagagcgaataataatactactactaataataattgagcaggattaagagattaggatttggaggatgagtcacaattttaaataatgtggtcagggtaggcttcttgaaaagctgcatttgaaaaatgacttgcaagaaggtagagtttcatctttgatgagacaaatcctttgaaaacccattttgcatggaacccaccagatggaggcatgttaaaaccttatcctaggcgcagtgcctcacgcctataatcccagcactttgcgaggctgaggccagtggattgctcgagcctaggagttcgagaccagcctgggaaacatggtgaaatcccatctctacaaaaaatacaaaataaaattagctgggtgtggtggcccgcacctgtagtcccagctactcaggaggctggggtgggaggatcctttgagcccaggaagtgaaggctgcagtgagctgtgattgcaccactgcactcaagcctgggtgacagggcaagacactgtctcc

SEQ ID NO: 28 - DNA, 4924 bp, Homo sapiens
atgtgatggggtagactccagactctagaaggcgattttctctgctcgagctggattgcacgctgctccaagccaggctgaaggaggagaaggagttgccgcctgtggtacggtcgagcagatgacgtggctctgcagcttgcctcatgcagttggtgttggagatggagaccacagctcgactggagcggtggtttcctagaaacatgattgtttattggcattgatctcacagtctggtgaggacttctttactgataatgtcaagttcatgttaccctcccaaccaaggagcattcagcacagaacaaagtcattatcctcctcactctgtaaagtatacgtttcccagcacctgccaccagcaggatccaacatttggaggcaaacatgaagctccatcctctccaatttcggggcaaccatgtggagatgatcaaaatgcttcaccttcaaaactttcaaaggaagagttaatacagagtatggatcgtataaatcgagaaattgcaaaagtagaacagcagatccttaaactgaaaaagaaacaagtaaaagtctttgcttataatattctaagaatgtgtgtttttctccctatagaagatatttttgagttttccatattttgaaactgtacataaaaggaatcatgccttatatattctggcttgctgttttttgctgctattgtggttttctttcattcattcattttccttgctgcactgtctgatcatatgattgtagagagtgaaatttgtttgtccattctgtttttgattttttttttctattccatacaatggtgctggtttttggttcacatgtagagattttctagggcatgtgcccaggaatggcagtgcttggcccaagattatgcacagtgaactatttaatagatgacaccaaatttgctaagaagtaacaccattttacattcccactggcaacttacgtgggtactggtttgtgcacattcttgcctttacttcatatcattttttcatttggatatgaaatagtcttctctgtggtttggaaggaggctgagcttattttcatttgtttatgggttatttgggttccttatgtgcattgttcatgtcttttgtctatagtctcctattttgtcattgaaatttttaggattccctgaagtcccttgtcaggtatgtgtatagaagatttgcctagtttgtggcctgtcacttcacttttagcccagtatccactctaagtgtacactaagtgcatttttttccccacatttcgagtctcactctgtcacccaggctggagtgcagtggtgcgatcttggctcactgcaacctctgcctcccaggttcaagcgattctcctgcaacagcctcctgagtatctgggactataggtgctataagtgcttttaatgtattcataaagttgtacagctatcaccactctctaactctagaagatttttatcgtttcaaaaagaaattccatacttactagcagttactccccatttccccctttccccagcctctggcaaccactagactattttctgtctctatggactagcatgtgccaaatatcagaaaaaacagaatcatatgtgacctttggtgtttggcttcatttgtttagcatgttgtcctgattcatccatgttgtatcttgtctcagcacctcattggtttatatgcctgaatcccattgtgtgagtttactatgttttgtttatccattcattagttcatggatattggagttgtgttcattttttgactatgattaataatgtactgtgatgagattcatgtactcgttttgtgtggatgtatttttgcaattttctttatatatctaagagtgggcatatggtaaatctatgtttaaattttttgaaaaacttcaaaactgttttccaaagtctctgtaccattttatattcttaccagcagtgtatggaggttccattttttcctacctccttgccaacatctgttattttcctttttttaaaaaaaaatagctattcttgtagatgtgaagtggtatctagttgtagttttcatttgcatatccttaatgactaatgatgttgagcatcttttcatgtgctgattggccatttgtatatctttttagagaaatcttcatttagattgtttgctcatttaattgggttgtctttttgttattctaagaattctttatatattctggacattagttcttcatcagatgtatgacttaataggtattttctctcattctgtgggttcttttcactttcctgatagtatcctttgatgtacaaaagttttgaattttgttgaagtccagtttgttttttccttttgtcactcttgcatttggtgttgtatctaagacccattgcctaattcacggtcacagatttatacctatgttttcttctacaaattttatagttttaccccttatatttgggtctttgatcctgatagtgtttttctggtgaacagaatttgtttaggttttatatgaaaacccactggggtttattaaggtagttttactgtattatttgtagaagttttatagttttgcttctcatcttattcttaatccactggaaactacatattgtatagtcagtgttcatttatatttactcagatatttgtcttcttaagtgctcaccatttcttctcacaactcaagtcttccatctaggggaacacccttctactgaagaacatctcttagaatttcctttagtgaaggtctcttagttagcaaattcagtatttgtttgttttttatgacttaaatattgtcttatatttggcctgtttattaaaagatatattaatttcatatgtgattgttttttcttagtacattgtcttcttgcttccatttttaagacattagctcttggtctaagtccgtattctttcatggataaactgaatgttctctctgcttattttcaatatattcttttcttcagggttccattatttttatgatgatacatttaggtgttttttttcgccttttaaatctgtccaacttgagcttcctgaatatgaagggtggagtttttcatcactttgggaaaattccaagccattatcttttttacaaaacctttctaacggtttattgttctacttatgaaatcctgttagttgtaatatcactcttgtcttccatgtctcttgtttctttcttatttttttacttctttgggcttcattctaagcaatttcttcagcctgtcttccagtttgcatcttccttttcaattatatgtaatctgctgtcaaatctgtcttcaatttcaacaattatgtttttatttctggaatttctgtttggctccttctcaaatctgcctggtcattttttaaaatgtttttttgctttcattgagttgtattaaatttttattatatacccaacaattctaatgaagtctttattggtttgattttgctgagtctcttttcttttgtctttattttctttacttgtacaatgttaataatctagtaataacaccaactaaatcacatgattgttttatgaattgagataatgaatatattgcataatatatggtacatagtaaatgtacatgcaatccattataataattagaaataatgaaatataatgtatgattattaggaagtgtagcagagccacaaattttattgagcgatataaaagacaactagagaaatatgccatagctggatggaaacagtaataataatgttgtgtgttcatcttggactaaatcatgtctcatacaatttcaataaaattccaattaaatttatttttaaaacatggcaaatacattgtaaagttaaagtaaaagaacaaacagggccaggctcagtggctcaagctgtaatcccagcactttgggaggctgaggcgggcctatcacaaggtcaggagatcgagaccatcctggctaacacggtgaaaccccatctttaccataatacaaaaaattagctgggcgtggttgcaggcgcctgtagtcccagctactcaggagtctgaggcaggagaatggcgtgaacccagaaggaggagcttgtggtgagtggagatcacgccactgcactccagcttgagcgacagagtgagattccatctcaaaaataaaatataaaaagaaaaagaatttgtgtcttgtttcctcattaatgttggttgaaagcatgtttgcacttgtctttggcttgtgttttcttaacatcgattggcatattaaaagtccctctgagcttaccttctctaaaaaaatgtaagaaaaaaggcctgtgggaaggactatgaggcagaggggctggtgtgagcacatgctgggcaggaggaaagaggtaatgaccaggtccagggaaatccccaaatccagcaggtcagggagccaaatgaaagcctttcatcctgtattggccacctaaccccatcgacactcaaagtgagcattctctcttagagatactcattgtcctgttttttctgtaaccttgcaaaggaatctgatttctcccattagcctttcacaggacaaaaatttcacattagaatgctattctttagaaggcatcttcttagattaggctgcaaggagattgaggaagttactatcagtcacttataccccacagggacattaattcaccagagctttggtgggggagtagaggagctcattacaagcaggtctggatgctgcacagagtgtaaagggggcagaaggatccaggacacctaggcctggagacagcgccaatgctgggaggtaccgttattatccccattttacagaggaggaaacagacacaggcaggtaatgtgatcaagaccacgctgccccgcagtacaggagccaggatctaaacccaggcagcctgcc

SEQ ID NO: 29 - DNA, 347 bp, Homo sapiens
tccttatatctatcctacaggagaaataccatattatccccattttgcagatgaggagacagaagtggagagaggtgaagtgacttgctcaacatcacacagttgccttcccacgtgtgtgagaccattgctgtggaaagaagccgggcctgacttcagggatctggtgtgaaatgactggacccatgcgttctgagtaaacaagagagccccttctggcttctccgggaggaaccaaatggcttcagcattcagctccaaagcccgatggagaccaagagtgatacactgtactcatgatcaactgctcagttctggtttgggcctctgagggctgatggggtttg

SEQ ID NO: 30 - DNA, 572 bp, Homo sapiens
attgcaggctgaagaggactggcctttcagtggccctcgtggaacggtaggaagctgagctggactctctgccacatcgttcggttcccacaacagcctgaaatggggtcttgccttgttgcccaggctggagtgcagcaacgtgatcatagtttactgtagcctgggctcaactcctgggctccagtgatcctcccgcctcagcctcacaagtagctgggaccatagatgaagcagcagcagaaaaaatggaagccattttggttaacgggtcacatcttagcagttggcagcgtaagaagcggaaggatccactggtcagaaatggagattgaggagaagctgagagcacggagggcttcaggggagagcctgtcctttggaaaagcgggcaatttgcactcgtggtagatgagtggggaggccgctcagtctctctgcccctttgcacatgctgcacccgtttagtttgacgtcgtggagagctcctccaggcacgggctgtgtgaaagggtttaaaagtttgggggcatggctgggggtccccgcatgaggggtgctgtgtaggctcc

SEQ ID NO: 31 - DNA, 8459 bp, Homo sapiens
gttgcaaatcctgtttatttaaatatttacaactcctcattatctttgaacaagttatccatgcttgtagccaagcaatagttaagctattgctaaacagagtccccagaattgcatctgtagctactgtattcatccaaagggaggatactagtattgttcccacatagatagtatcactatttccttcattgtttataaccctcattttatatatatatattttatatgcatatacatatgcattatatatgcatatatattttttatatatgcatttatttcaaaattctctctgtaatgaatgctttgatttttccatgtgggatgagcttttgtcatctgattgttctactccaacacaaattcaaaacagcacagcaaagatctataaaatatctagattacagctctagataatctctctaatatctagaattctaagatatgttatctttaactattaatgggatctatttaagactgctcttttcaagatcagtattattactatctatgtccactgtatatagacaatggatatttttccttcgaaaacatgaaaagggaattgtggcttattgaaagtattagtatgaactcatgaatttaatatgtttaaatgtacttaatatatcacatatacatacattcaaatatttccttttacatttcttagctctgtctactgaaagagactagaaacaatggccaattaatagcaatatacaagtcaaatacccagatcttctttctaaatataatttgtcactagaaagaaccaaggctccttgaaggaaaggcagatttcagagctggggaagacaaataacaaaataatatggaacatcttgtaccttagaaaacatggaagtacttaaagaatgagagggacggctgggtgtggcagctcacgcctgtaatcccagcactttgggaggccgaggcgatggatcatttgaggtcaggagatcgaggccagcctgaccaacatggtgaaagcctgtctctactaaaaatacaaaaaaaattagccaggcatggttgcacatgcctgtagtcccagttgctcgggaggctgagggaggagaattgcttgaacctgggagatagaggttgcagtgagccaagattgtgccattgcactccaggctgggagacagagcaagactcagtctctaaataaataaataaataaataaataaataaataaataaataagtaaataaaaataaagaatcagagggacatgttgaaagggcaaggtacccagctttaaggaaccctgctggccaaattttggaaaatttgagcatcaaaatgaagaatattagcataaagtctaacctattaaattaattaagaatccaggactctgtactgatataaactttaaaaataaagagataaagggactgatattaaaggctcacatatcatgccaggtaataccaatgactttaaggaagacctgcatagtagaagcctctctaaagaaattatataaacctgaatgactggtaaaagcaagaagaaacagagtgaagactgaaagacaaaactctctttaattcttttcttctcctgctcccttgtttctcttggctcaatttactatgacagtaactatggtatttcacttatacaatgttgtagaattaggaactgccagaaaagaggtttctaagggaacttcctgaatgttttcactttacatgtattatcgcagtgggtttgtcactgaaaacagaccaatgaaaaaatctccttgaaagcaaatcattgttccttcttcccaactcttgctacatctctgaccatttttcctctcagttcctcatccagctaatctatttctcccagggacttaagaattggagaaactctcaggttccatgttaagaactcaagttctggtaaatgtaatgcaatgaatatctcaaacataattccacttctataacttaaaaagaaatcatgaattcagcgaattagtaactggctttcaatgccaacatatttaaaagtaggctgaaaatatatcataaggtatgctatatgaaaagttgagtttaaaattgtatgtcaaaaattacttgatctttacacaatatttccatgagttcggtttgcattaaatatgaacgatcatatttaatattttattgttttacattaaataatggtaatattctaatggctattggattttaaatagaacaaatatatcatggaaacttctgaaaataaattccatcttgtgttaaatcataataacaaaaagatattataatcacttatttaaaaatgatttgtgagtaactactactaatactacatactacatagtaatagcactctgtagtacttctaatatgttggaacatatgtgcccagagatgaattaataatgtctctgtcctaaagaacctcaccagtgataaaagcagacatgtaaatcagtaattgcaaagaaatgtgtcaactgcacaagacaatggcagcttaaaaattgaacaattcaatgggtggtaggcaggagacagtgagaagcggcctcctaaagtagaggatgcttgaaggggagtttcaaagatgagttcgttatcaggaaagaacgaatgcatgagaagaatattaaacaatgaaaacagcatacgcaaagtcacatatgcatggattagcacaatatatggtgggaatgggttagggaagttttaaattttaagtgggaaccaaattgtggaaacccttatgaactaacctaagaagtagtataactgaaggcatgaaagaatcaaagtgaaaagaattttcatttctcctgggcctgaaaagtctttcctccagatttttgtacaactagatactgttcattattcaagtcctggcctaaaacacttcctaagagaagctctcccttaccatccagctaaagtagtgccacactatcatatccacctgttaactttccatttcctttgtttgtaaagctttcgatatagaaacatacaataaataccaattttacaacttcatgtagcatacacaaacatctccttgattcttgcaaattagactgagaaaatcgtggaaattgctaagcaacgtttggtgtagtgcaaactctagggatttgctggctggcaacattcccttcatcctgtaatgaacatattttgttcagtagtagccatatgagtatgactaaagcaaagagacccattcagagatatttgcattttcttaacacagaaagaaaactttagtgcaaaattatcagatagtatgataaaacatagtgaaacattttggggagggtggaaaagatgtttctagcccactaaatcatacctcatatgcaaaactttctgcttttcaagagagacctacatttgtctccagagaagaggactgggaaataaatctccattagtcctaggaaatgtaaacttcttttatttagcttttcctgatgaagtgtaggttcagggaattttcatatataaaccattatcctttaaaatatgtgggggcttataaacgtaatatatctgttgttctttggtctgtaaaatatttcaataaattattgaactcttgaagccacgaaatcaaacaaactaaatatatggtgtcttttacttcttcaattttcattttaaaatccccaaacacctattgttaacaaatgaaggaaacatttccttatttcctgatcatccctaccaaaatattgttgacaatagaaaaaaattaattatggcctatagtaggaagcatagtcattaacagtatgtcctggaaattttaaaattttattaaaatgcctaatctctacactataaaatatatgcaaacaataaactagattggtatatgcaaacaatttaagattgaaactagataggattaatttatagaacatatatagctattaattgatcaatatcttaatgaaaattaacagtgcataaaaatattcataattgtccttaaagaacatgaactaggccgggcaccgtggttcacgtctgtaatcccagaactttgggaggccgaggcaggtggattatctgaggtcaggagttcaagaccagcctgaccaacatggtgaaaccccgtctctactaaaaacaacaacaacaacaaaaatagaaaaaaattagctgggcatggtggcgggcacctgtaatcccagctactcaggaggctgaggcaggagaattgtttgaacccaggaggtagaggttgcagtgagctgagatcatgctgctgcactctagcctgggtgcaacagagtgagactccgtctcaaagaaaaaaaaaaagaatatgagctaaattttatcacatatttatgtaaaattttgaattgtatcatacgtatttattcacagcatacttttatttaccaaagtacatcgtacattatacaaatcttaattacatttacattatacatttataatattaaaattgtgcgagtagtcttcaaatatctgacaactttggggtcagtgaattatttaagaaaaaactcagaagagttttgaaaaaggagcaggtgtgattctacaaattcaatatgaggcaccagtgggagaagtcaattggatgagcacatgaaatattaggagtgctcgtgagggggaagtaacaggtctattgtgtgcagtgctgggcaggctgcatatggagaatgtgttaaaagagcatttgcaaacttaagcattacttgaagatattaaacagaatgatggaagcctggtctttgattatttattgctgacatatgcattgcagtgatggcattaatgcctaatgattaagctaacatgaattgacaatgaacaagtcatgctttataaataaaaaatgcatgttgtttgatttgactcattctttgtgaacctatgctagcttcatattctttctctcgatgtcctatttttttggtctatagtttgtgaggttcacctttttcctctttagaaaatggtgatagctttgcttttcaactgactcccctaatgtccacttttcttcagagattacagacaatggttttccaaatctccttattcttttattgccttaggatctaattgcaagcagttgaaagattaaaatcctctaaagaaattaaattatttctaattatcccatgacctgttttaaactacaattttctcttaaagaaacttaccctccatttttcttttaaaattactccctgtgatagagaaagtaggagacaactgtctcaaaaatctgcttgctcctcttgatctattaaaataccattaaaaattttgggtttactttgctggtgtcagttgattttgtgcttactataatagatccatttgaccctttcatattcattgatatgtacatgtactgttttttcctactactgtagtttctcttattcattcaacctcagtgaggaatacaaacatgagtcatgctctcaaagaagcctagaagtaaggctgagatatgtcaacagtgttgtaatgcaagccaggaagaaacatgataaaaggttccagtagcatgtactaagagttcagtagataaggttactttaggtgattatgtataaattttaaaaaaactttctatacgggctttatttaagctggacttctaaagaatcccctatccaagaaaatggttgggccttaataggtctataaattacatgaaattatatgtaatatttggaaaatatgtgtatgcaatatagaatgtatatattgtgatagagagaaaagggcagaataagactactagtattcatcatattctgaaagacatccacacagagtagtgtttggagagttttgcaacattattaaaagagtatgattagaattacattctcattgcttccaaatgttcatcagtgtttttgcttctcaacaatctaagcaagcatgatgaacttttcattgaatttcttgaaacatgcttttccagagactagaaaacacatctgattgttccttactattttgcaatataatatgttcatttccttccccaaatcttttcttcacctacaagttcactgataaaaattaagcctataatattattcctttgtttcctttcactttctgggaattgaaactgttgtcattttaaatcaacaataaaattatattaaaaataaggggcagaattagaatatgggcactagatatcttattaaaataacagaatactcaacttttttttaattgtatggagactgatgggaaactgaattcatacactgagaagagctacagagaataaaaagaacaaattaatatgtgcatttagaaagcagagggaatagtaatataaaaaaggagttaaaaacataaaagtagagataagtagtgtttcacagagttttctgtaagggtaagtgcacgaaaaatggcaagatggttttaaaagatttagaattcacaaagtagaaagtgacagaaattgaactactcacttaaatttaaaaagagacggggggatagattcagctacttgatggcatgaaatcaaagtacttgaatttttgaagtgtatttaaaaatctagtaaagaatgcctacaattacaaaaggtatgagattgtctttttgagtttagtagaatataaactgacgacaaaagactgacaggcaccaaataagtagagtgtaaaacaacaacaaaaaaaagaaagataaattcaggtaatgatattcaagcagtatgactgcataagattgcataagaaagaatacatttccaaatccaaaacaatatcatcctgttgtattatatgcatatattgaatacaataacaaaagtatcaagagttcttattaaagcacccattatcatttatgtaaaatattgcaagactttaaagtcacagaacaaaacatattttttccccattatcttttttgagatgatcacatttcttcacactttgtgaactgcgtagttaagatggagcaatgatttgaactatttgcaaatgcagttccttccccactctttatatactgtttgggccatgaatctatggaaagaggtgttttacaagaacgaaagtcacatcattcaggactttctagcataaaatgatctaatatgcttagatttaagtggtcagattttgccccttcctccctttcctctccatgttcccagatcatttccagagagataagtaactaattgacagtgttgtttgagagtaaattcctgagttatatagaagttggaacaattattccctcataaaactaaaacaaattctacaatagttacatgaaatgcagaagcacaatcaatgaacattaattcttgactgaaatgaaacagccctggtgttttcatgcaaacttagctgctataaacctaaaagatgcaatcaccaaaagatgtgaagtcttgaggtaaagattagcactataaatgccatttgatatcagatgaaatatgcatttctgtacatgtgtttagaagaatctaagcccctaaaacttctcctcactaaccccaagatgcctgaatttctcaacattaagttttcacatcgtaatacagttttctttcctggtgtttcctcttctctctgcctagtaaaggatgttataaaatcgcagttcaatgtttttttctcttcttgtattttccactctgctggttatggccaatgagtcaagattcaaagtgttcccatatatatctctgcagctcaaactctccagaacttgggcttgtatttccagttactggacttaagctgggcacacccacagtgtccctggactgggtgaggaatgctggaaaccactgcataaacatgaaaaatcattccgtaatttaggcaaagtttggagagagagtcacattttataatagtacaaatacgaacctacaaaagagtagaatcccagactgggccaagaatgctggaaaccactggataaacatgaaaaatcattccataatttaggcaaagtttggagagagagtcacattttataatagtacaaatacgaacctacaaaagagtagaatctaaaatccacatgaatctttagacgaaaactagagatgaaataaagttgctcttagtggggttaggtgagtatgtcattgttagagacagtgatagagaagtctaagaaactccatactgtgctaaataaatccaccttttaagtgtggattcctatttttgtgggcttttgttttttattttacattcaaggggtacaactgcagattgggttaacatttttgtgtgaatattgaaacagttgtgaaaggaagtttattaataggaatgaccataaagacgtttacagatttcagctctaatgtcacaatttagggcaaagaagggtagctgtgaagttgaagagcactaagttaactggcactgacctcagtgacactcctg

SEQ ID NO: 32 - DNA, 354 bp, Homo sapiens
cagagggtaactagctcagaatttttagttggtggcatgtatttatgagatggaaaagtctatgtctgagaggggacagaggcttatcttctagcgtggaaaggagaaggggatggaagaatcactgaagaggagaatacagaccaatctcactcccgtgaccccacccagaagtgattcaatgcaagaggacagcttggatctcctatgacttcatctctgccccaacccatcagcagcaagcactcattgcctagcaaccaccggcccttaccccacactgtctttgaaaagctcctgcttatgagccttggatgagactgatttgagtgttaactccacctcccacgtggc

SEQ ID NO: 33 - DNA, 1393 bp, Homo sapiens
atgatgttggaggatacctgtgcatctcatgctgtggttacagcatcaattgtgatgaatataggatactgagtccctcctagaaatgacttcaggaacttcaccccccaactccacaatctgggaatggcagacagattcagcaccaggagaacatcacataaaggacaagtgtgtatgtttaaaaatggcaagtttcggcctggcatggtggctcacgtctataatcccagcactttgggaggctgagtctaagtgtacagtgcttgtaaagtctgcagtagcatacagtaatgtccaaggctttcacatccactcaccactcgctcactgacccagccagagcaacttccagtcctgaaagctgcattcatgactcaatcaccacaattgcaatcaaaagacggctttagttggaacctggaacgtgctaatcctgtcaggcagcctgtgattctggaagtgaaggaacaaaaaaaaaaaaaaaaagggaaaatttcacataaaatttccatatgaggaagaagatggaaacttttgtgttgtgcgttcagtaaaacgggcactttcttaagcaggtggcaaagaaagcctgagaatccggcctgactttttcatttcagaaccctgcatttcccacacagaggagatagagcacagccattgcatggtagatccagcttgctctcacagccattgtgcaaataaacatacatgtggcaaggcagtgcagttttcagttgttaaaagttctgtcatgccacgagatggagcaaaggataaacgctgatgtaaacaggcaacaggactctgactccacacccctgtctgcacggaggatgctcagtccttacacaacaaaatgtgagatgcttccagtcacctcctggccctgacccctgagctccgtgctcaccccactggaggtcctggcagttctccgagcaggctgtacctgtctggggtgatcctctccacttaatgttagacattaagttccctgtgaaatctgttttgactcactgaggttatgaatattttatcacaactatcatcatatactaccaaatctccaattttcttatctccattactagactgtgagctccctggaggctggacctgggtttggcaccgagtggcactcatacatacttcttgaataagagaatgtatgtacacagtggcatgaaattgatttgaatttgttggttttcttaagtgctaaagttgtagacagttcagtaaaaactataaagcggttaccctgtaaaccatgagtactattaattggaacctcctttcttacatatccacttgtgtttctgttaatgtttccaaaataaataaagagcaggctagagggaaacctccagtccttagaaaccacggc

SEQ ID NO: 34 - DNA, 695 bp, Homo sapiens
aggaggccgagaccaaggggcttggcggggacggaacggtgaggtcagagaatgctgcagaggggacattgggaccaggtcttgcagtgagttgaagtgctccaggcagagagcgccggtgggtctttcctggccaggccgcagggggcctttgggaagcacccgaggcctataaccttcggagcgtttgtcaagctctaatgagaactggaaagcttcagcttcccgaggtgggctgggagggccttaggtagggcctcgcacaaattgcgaaggaaagccgaccttgttctggagagcacgtggtgaggaaagccagcgacttgatgtgagcatttaaacgggaggaaggaagatgagaactggtaagattcttctcggccgggcggtgcagcggctcacgcctgtaatcctagcactttgggaggccgaagccaggcggatgacttgagttcaggattcggaagtttgagaccaacctgggcaacatttcaaaacccccgtctctacaaaaaatattgtttaaaaaaagccaggtgtagtggcacgcgcctgtagtcccagctacttgggagctgagctgggagtatcactcaggacggctcagattgagcccaggagttccaagctgcagtgagctatgatcgcaccactgcactcctgcctgggtgacacagacaccgtctcaaaaaaaa

SEQ ID NO: 35 - DNA, 422 bp, Homo sapiens
gcagagtgccaaaggggaagagatgcggagcaaagaactggaaacttctcaggcattcacattggcaactcctgttccaagaataattatttatgacagatttcaattttcggggcagggatggtgtcttactcatcctgggcttcaggacatctgtgtaacagacgctccaggtgaagcagtgatgtcaaccctggctgaacactggaatcacctgggaagatcaaaaagcaacacctcctgcatctaggtttggtctggatattggaattttttaatgtcctggtggttttaatgggcacgcaaggttgagaactacttatttatagttttcatcaaaagtctgtctggtaaactcttaagtctttttcagtctgaagtctttattttgaattcaatcttaataaaaatttggtggttta

SEQ ID NO: 36 - DNA, 676 bp, Homo sapiens
catgaccgtgcctctgagaaaccagcgcgtccgcaacgatcactcctaattttcggattcctatcatctgtctccacgtgataacactgaagagccttcacattgatgcaggcccagggcctcaagtgcagagtctgagagctctgcaggacacagcatggagccgccattcctctactgggtggaggagcatgtgtcctctgaacaggggatccaagccctgagatgttctttctcagctgtcagtgcggcccaggactttctgtggggatgctcagacagcaggggccggaggacttttagccaccacctcccatggccagtcttcacaaattacctttggctaatttgactgtctctcctcctggggtctaggacttcaaacatgtacagaagcgattgcagaattaagacaagacacttccacaatatattttttgtatcactggctcagaaaaagactcattcaaatcctgtatcaaagccacatgtgagaatcttgagaaagcatcagctgactgacttgacaagggaggaagcaaccaaaaattctgcgcttcttcagtatctgagtatgatattttgcttcaacatccctcttagatgaagttattgattgaaaatcatttaagtttgccccatggtaaaagatcaagtcctcagaaagatctccaaa

SEQ ID NO: 37 - DNA, 1112 bp, Homo sapiens
aagaaggctccgcaggtcggcagagaacaccaccactaatgggaagactgccccctgaccggcacatggcctcagcattcatccacagatgctcctcaaattgttttaaaaacagctttttttaaaagctgtttgtctatgaagattaaatgagttaataatataagcaaagcactttgcatggctactgggcacggtggttcatgcctgtaattccagcactttgggaggccgaagcaggtggatcacctgaggtcaggagttcaagaccagcctgatcaacatggcgaaaccctgtctctattaaaaatacaaaaaaaatagccgggcatggtggcacgtgcctgtaatcccagctacttgggaggctaaggcaggagaatcgcttgaacctgggaggcagaggttgcagtgagccgagacctcgccgttgcactccagcctggttgacagagcaagactctgtctcaaaaaacaaaaaaaccccagcttttgtccagaggttgctttttgtgggtctgtacgctgaggccaagttctatgtaagcagagccctcccacctcacctccaaacaatgcctctaaaccatcacaatctgaaaggaaaataaatccctttcttcaatggtgacctgaagctagccaaggaccgggtgctggcaggtggcctgcgagactgggtcggatcccgggttactgtctgaggagggatgccgtgctgtaagggttggggagccagtgtctggcttccttgtcaccacaagacctgtggtttccagctctgtctgcatccaggtcccactaaccaacagcaggagagaaaacagttgtgcacacaggcggacgcgcacacgcgcacctggccccccagacgtgcacagccctcagaggaagtggagcaccagatgttctgggtttcctgttcgacgcttccacagctggtcgagtctgtggttgtggtttgtctgtctcgggctcatgtgagagacaaaagctgggctgacgggaaacctcttctctcggcccccactccccagctctgactgattaggaaacctggcaggtcagaaatttcctgaaacacccagagctggattctcccaagaagaagc

SEQ ID NO: 38 - DNA, 477 bp, Homo sapiens
gaattgtctaatatggaaagaatgaaagacagctaataagcaactctctgcaagaagacatatggcttaggttctgctgagctattgaatctacttggagagagtcaaacacagaatccctttgaatttaatggccattccaggtgatttgaacagccaaataagaaacaggtcctcttcaatgtacaatctgccaagtatgaagtctgaatgaccatcattattatgtatttaatgtgcatagaaaatctatctgcaaccttccagagtgtaccagaagtttggaatgtacattattattggctccatctcaaaccactcataaatcaaagaaaatagcagttccagaggaatcatcatagaggcttctaggcccccatgctgtgtgaacctggtgagaaagggaagtctgctctcactggacactggaactgtttgtctctgtctctgctgtactttccctgcctctacctcact

SEQ ID NO: 39 - DNA, 527 bp, Homo sapiens
gcgcactcattctcaagtcgctgacacctcctccaccagagagaaaacactcgcaggccccagtggccctcgtgggcctcccccggggcgggtcttagcttcactcggcaaccctctgcaaaagagcaggccctcccaggagcgccgagtcctgtctgcagtttgctgattttcccaccaggggccgctgcgcatgggcgacgaagcgcgcgggttcccaagccgcagagaggcggaagccgattggttgtcaggcgaggcgcgagggcggagcctgggaactggccgggagttgggggctgggagctcgcccccgggccgagccgggtcaggctgttgtcgcctcaggcagctcctgggaggctaacgtcgtgtcctgggcctctgtttagacagctctagaactgaggcgagtggagcagcaccaaggcccggagatcggggcagggcagctgctgtcgccgccgccgcaggcctgagttacctgagtaactgcgggtcagggacccgcccgacggcccgcggtt

SEQ ID NO: 40 - DNA, 766 bp, Homo sapiens
ccccgctccatctccttcccttcccaggccgcagctgtcctttgtggggcgtccagggttcgcccacatccacctccgcgctgggcacctggtggtgcttacatcgcgtttggtgaaacgcatcctccagccatgctatgcttgcaaagatgtctctggtcattgggaaggacggcagcttgggaaggaggatgtccgtgaatgtcatcagtgagccggcgcctgtccccctctaccctggagctgaaggcagcttctacacaaaccctcctggggcctgctccgtgactcagtttccctgtcatgtgctgctgctgcttttttttctctttcattagggcttcccctccaccctccctgcagggtcactgggctggtgccctgggcagggaggaacaccagcatgtggcctcagacctcagagtcctttctgctcgctcattgacctgtttgcaactctggactcacagccgacgttgcaaactgaggttcctggagtaattctaaccctttgggaatcgccccacccccagactgtgagcacaccaagggcatgatccatctgtccaggccacccttgtgtgccactggatgcatgaaggaatgttgacatcagcctaaggtcctgcgtcagctcccagtagcctgatgtcaggacctcaaatgcaggctgagaagagaacataggagatgggccttttataaggccaaccagaaggtcagaagacttgggctccagccggatgcggcgactcacacctgtaat

SEQ ID NO: 41 - DNA, 1102 bp, Homo sapiens
tattaatgaccctagagggaccctttgtcctcggtgcacaggctgtaatcagcggggctccgggggctctggcctaatttggagggacaggttttatcatcacccttgattcgggtgacccaatctgacaggcccacgaccccctgtatgcggggtccacgtcagagatgggcttcctcccagcggcccaccccagcgggctggggagagggaagggggaggtggtggccatgggggaagttcggggtgaagaaggggtcacagccagacccccacttggatgggcctgtgatcgggttctcgggaggagcaggatattgattagatcagtgaatggtgtggaggcagctctccccaggcacgtgctcccgaccacccaccagcaagcgtctgttgcctgccggtgccagggctgggtggggactctgggacaggccggctgcctaggaggggccaggcaggagccaaggggctggctccagggactgccaggagggccccagggaaggggagccgggaagcgttttggctgcctccggcgtgaagtcgtggaaacgtgtttgcagatacatgacaaagggccacctcatttaatgcttccctcaaccttcccaggccccgatccccatgttctgggtcaggaggcccattcgaggtcaaggggtgggcgaaggctgacgagacaaacccagggactagctcctgagtcccaaaacctgtcctcacccacccaggggtcccctgcacgctctccagggtgtgcggtgcgtggctgctgggtttgggtgcattagagcctgaggcaagggcttgagtctgaattctcgctacggaccaaatgtgtgcgtcctccctaaatacatatgttgaagccttaactcccaatgtgatggcattaggagaggggacctgtggaatgtagttgagtcctgagggtgcggccccgtgatgaaattagtggcctgataagaagaggcccagagaaccggctctgtctctgctctctgtcgcacgaggaccccacaagaagacggccacctgcaaacagccattgaatctgccagtgacttggtcgtggagttccagcctccagaactgtgag

SEQ ID NO: 42 - DNA, 204 bp, Homo sapiens
agtcgccattccccattttacagctggggaaactgagttacagagcttttctgcactgagtcatcaggagcaaatgctagatcagatagagtctctctctctgccacccaggccagagtgcagttgacgcagggcaggggagccccgaagtggagcatagtgtgtccggaactggtgggttcttggtctccctgacttcaagaa

SEQ ID NO: 43 - DNA, 583 bp, Homo sapiens
gggttgtggttgctggctgttaccaggacaaccggaggcgattgaccgttatctgcggtttggagccgttagcgggagaggcagagatattcagaggtcttttaggatgcgctaaagggtcgtgagggctctcttaaaattttcttcacaagcggttatccagtcgtgccccgcggccctgctgctggccccggggatctgagtcgtaccctcttgtttttctctgagtcagtcttaaggtgaaatgaagtgtggcccagtggctcctcactgtcgcttctctagttttctgcctccttttagaaaagtgaattgaaaagacaggatgaagtggacacagcatgtgaagacaattctttcaagaagtttggctgtcaaggaaaacagagaatgtgctaaagaacatacagacacagagcagacaggccacctttgcaaccacatggaggtttgtctgatattgaagctaaagaagctaagctggaagacagagagaccaagtcctgatgacattgtttgaacccagagatccagacatgcctgaaaactagttttaccactggacttatccgttgaatgagcc

SEQ ID NO: 44 - DNA, 856 bp, Homo sapiens
acatactgatttaaagtttctccttttccagttttctttcaggtgagagttcatgcttgtgggtttgactcaaagacatctcccaaaggacaaggaaatgcagcacatggtacaaaatcctgctggagactgtactacaatagtggcctttggaaacaagaaatttgatgatgatcatgaccatgttgatcagttctgaagacaacaaaatgccttcacttcttagcatagaccatctggttttcatttcttttgaaagtgaaaacgccatctttatgaaaatagttcaacaggtgtgttgttttttacttctatcttgttttccccttattttctcagcaggacaagtgatttcattcctgaagcaggaaaagaatgttaagatacatgccactagaaatgacaatgtcaaacactgacagagtcgtttcaagctcagaatgaatcacttttaagacagtacagtttggcttgtttcttttggggccataagacttttaatacttctttcattgagataagatgagagtaaacattcgacagagaaatagtaagaaatatttaaattaattcttctaaacataaatgctgggattaaaacaataagtttggccgggtgcagtggctcacacctgtaatttcagcactttgggaggccgaggcgggcggatcacctgaggtcgggagtttgagaccagcctgaccaacatggagaaaccccgtctctactaaaaatacaaaaattagccagacgtggtggcgcatgcccagctactcgtcaggagaattgcttgaacccgggaggcggaggttgcagtgagtcgagattgcgccattgcactccagcctgggcacc

SEQ ID NO: 45 - DNA, 1277 bp, Homo sapiens
ccacccccaagcccccatccaggccattcctgcaggagatccttctcccatggggctccaccccccaaccccagcccagtcggcttccaggatcctaggaagcacagagccaggaaaccactgccctggggggcctcccagagagctgcactgcagggtctggctgggaagggccctgcaaccccgcctgtgtgtggggggagggaaagttgcagaggagactcagtgctgctggtggctggtgggagccccagggctgctggcccaggccccgcttctgtccttccccttttggaccaaccgtaccccctcccctgttgtgggaagtcagggaccccaaatggagggaccggctgaagccacggcagaagaacgtggattgtgaagattttatggacacttattagttcctcaagttaatacttttataatttcttatgcctgtctttactgcaatctctaaacataaattgtaaagatttcatggacacttatcacttccccagtcaatacccttgtgatttcctatgcctgtctttactttaatctcttaatcctgtcagctgaggaggatgtatattgcctcaggaccctgtaataattgtgttaactacaaaaattgtacagcatgtgtgtttgagcaatatgaaatctgagcaccttgaaaaaagaacaggataacagcaattgttcagggaataagagagataaccttaaactctaaccgcaggtgagtcaggcagaacagagccatatttctcttctttcaaaagcaaatgggagaaatatcgctgaattctttttctcagcatgggatatccctgagaaagagaatacgcacctggaggtattggcttataaacagcccccccaggtgggcctgtctcttatggttgaggctgcagagatgaaataaactccagtctcccatagcgctcccaggcttattaggaagaggaaattcccacctaataaattttggtcagaccggttgatgtcaaaaccctgtctcctgataagatgttatcagtgacagtggtgcccaaaacttcattagcaattttaattttgcttcggtcctgtggtcctgtgatctcgccctgcctccactggccttgtgatattctattaccctgttaagtacttgctgtctgtcacccacacctattcacacactccctccccttttgaaactccctaataaaaacttgctggtttttgcggcttgtggggcatcacagatcctaccaacgtgtgatgtctcccccggatgccca

SEQ ID NO: 46 - DNA, 1538 bp, Homo sapiens
gaggcaggagaatcgcttgaacccgggaggcagaggttgtggtgagccgagattgtgccattgcactccagccttggcaacaacagcaaaactccatctcaaaaaaaaaaattattttgtagagatgggtctcactatgttgtccaggctcgtcttgaactcctggcctcaagccatccccctgccttggcctcccaaaatgctggaattacaggtgtgagccactgcgcccagccagtagccattattattaggtaattttagtagatatctctaccacaaagggcctgtgaacttctaggtaaccagtaaggccagttggtgtactgctttgctgccatagatttttgttttctagttaacacccactgaaacatgttgctgtgaatcttacctctagccctgcggtccccagcacagagatcttcaaagctggctgtacagcagcatcacctgtgtaacttacactcatgctactgtgattgcccgggtcaaaggttggcacctggcctccttctgatgcacaggcccacccacagaagggatccactgaagcccaccaggtccggaagtatgaggaacccccagcatccacctcattgtggaactcacggtccagccactctcaggatggatcaccaccttcatcagaaccatctgggcagcttatatagctttctaggggcccagctcagacctattgaactggaatccctgagggtgaagccaggaatggggttctaacaagctggccgcattacatgctgaggtgcatttatgttctgcaggaaaacacgctgcctgcgtgagtgaaatcaccatctgctctcctaagttcttctggaaagagcaccgtaaccatgtcatcctaacagcaatgccatgaagaaagggaggcagctccctccacgtcctggctccagtgcccactcccgtgccccctccatggcccacgcagcctggccacctgggtgacatctggtccctgtgtcactttctgcaagacaaggaccagcctcaaagaggagagcatggtgtcctgaaggagatggcggccaccatcacctgtcctgtggctttcctctgactgcccaggtgggggcccagaggcggcgcctctcagtccagctttgagtggagttacataatttccaggcttccctgcagttctcgcctccccatccctgaactgtttacacagtagctctcacccacaaagagtccgcatgatggcttttcctctgtttggaagatgtggatggctgtgtcccaagtttttcctacctaagatccttttcagtaggggatggatttggtctatctgatgatcaagagttcagggtggcctttgtgatagtgttacaccccctcccaggtccaataaacagtcttctgacaaataatggcccttccttttccttccccacctgtccaccacctggtaatgtgatgtaagcgtggcaaaatcccacacaccccttccagaaatcccaggactcgtgtgggaaatactgtcataattaaagccttctgagaaa

SEQ ID NO: 47 - DNA, 1875 bp, Homo sapiens
acatacgcttgaatgtctgactccttttgcatttctttgagagacaggagttcaccccaggaaggattatgatgttatggttggaatgcagagagaaagcttttgatttccaaaacaggctgtttgagtctgtgtcatcccaatagccctgatgtcttgatgagaaagtcctgcatgatgaccacctgccctttctatagcaggagtcaagatctctgaaacaggttgtggagtttcacaggacccacaagtagaggaatccctgcctgcatctgcaatgggaatccttcagaaggaaaggctgagaggagcgagatgtcactgtctgtccccatggcaaccttggggctgacagctgggagcaggacgcacacccaggagtcttagcctcaaccctgaattcctcttttgacaaatggaaacctcattccactcttgccgatgcatcttctaatccagagcagaacataatccccatctcttttctctggaacgttgggagaatttgtgtctgtcaaatgctttggagaaatgtgaaaagaatgtttaaaatgccagatcattttttcaaaaaaatcaattataggtttgcctttggggtaaccctaagacaacacaaaatctcaaactttcatcccactggagtgaaggaaaataattactccgttaggttttcagcgatcacgcaattgccttggattttacattcaaattccaaccaggagggaactgcgatcttggagcgaattctaaagaaatgctgcgaaggcacaggtctcttccacagggcccaggcctcagagccagcagaaactttgcaagtggcatttgcagccaaaacaattctgacagctcctctggaggggtctggtaactagactctgcaaactggaagaaattagctctgaccacagaccatccaacagacccgtatttaataatacttcccaaacgtgtgaagcacttagttttagaataacaggaagaatggaatcacctggaactacagatttgagtttcattctggccatcataccctcccaggagccttgctcctctggtggccaagaggggtggccgaagcccggtgccgctcccctatggcccccaccccagggctagcctgtcttggagaagggtgacattgaggctctgtaccctgcaccctggccttctcgaggcagaggtcaggtctgccgggggaaggagcccacgtgccagctcgggcctggaaacgtgagtctccacagattccaccagcctgcgggaacggctaaaaaattgctcccttccttctcagctgctcctggacagctccaggaggcctttccgacaagagagcattgtgtcccattggagccctcccctgtcacaaagggggcctttcacggctgcaactggggagggtggggacctcaaggccggctcgttaaccagctctgggcacagtggctgtggctcgagctaccgctacctggaacgggccctccttggagacgaaccctttatttgacttctaacagggagctatcctgaaggaggccagcttgtttgctgggaagagaagtggttggctacttactgcaaacagatgatacaaaaattcacatatcccttccggaataagggctgtggagggatagatgggcttgtggtgggaatgattttcagaaagatttgcaagagattgatggcgctggttgtatctgggtagctgggtagtatgcagaagggacaggaggggaagaaacttacactctatccctgtggacttaggcatattggactatgtgaacaaatatctaattcaaaaatatcctcaccttgcaaaaggctaaatatatactcccatctcagagagggagggagggtggg

SEQ ID NO: 48 - DNA, 2121 bp, Homo sapiens
gagttttaagagttatttatatattctagatacaaaccccttatcagatatatggtttgcaaaatttttctcccattcttttggctgtcttttatactttcttggtggtgttcttagaaatacaaatatttttagtatcaatgaaatccaacttaactattttttcttttgttgctcatgcttttggagtcatatctaagaaaccattgcctaatgctaggtcattaagatttatcccatcttttcttttaggggttttcataattttagctttacatttgagtctttgatccattttaagttaatttttgtgaatggtgtgaggaatgggaaaatttatcccatgcctctctcctagcttctggcagttcttggcttttcttatagataaatctttccaatctctgcctctggcttcacatggctctctcctgtgtatgtctctgtgtcttctctttttctgtctctttatcaggatttaaggcccactctaaattcaggatgatctcatctcaagatctttaacttaatgacatctgccaagacccaatttccaaataaagtcacatccacaggtgctaggggttggtatttggagtatctttgggaggcaccactcacacctgtcccgtggtcttcctctgaggatgggtgaggagaagatcagttacttactcactcatctgctcactcctccaacagctatgccaaaggtcataggaggatccagggatatgataataaattggagaggatccttgccctggagaatatcactatttggaagggctttgggatatgaataacagaaacacaaggaaagggatggtgagagccataagattcggaagctgaaggactaatggaagcagcccagagagggaagggctttcaaagcagaggctgacattgtcagcaaaggcagaggctagagagcaaaaataggtgaagttgtatgagcccagaaccagctgagttccccaatccaggctcatgctaaagccagttctgatcatctcacttcctcatttggcaagaaaacgcctctgtcgcaaaccaattgctgagcttcatgtctttcatgcaaattttgctataaaatcctgtcacaacaaacagaactgagctgctcctcggagctccatgaacgtagatggcaggactgtcttactttttgaggtagcagtcacgacagttgtcatggggtaatattattgctccagagccctgtggccagggtcctgctgagggctccacacagaggggacagggtggcatgtagacagaaggctctcactgactggaccttgggacccttgagattctgagcccaagaggtgtcaccccaccccattggaccttatcgacggcctctcccctgaagagcaaaggctgagggcaaaaaggaaaacagattaacagcgcaaaagctccctgggtcttcagccaggagcggcaagttccttacaaatttacacacatgtggcagaagcgtaacaataagcagagtcgtgctgggctagctgcgccgcttctgccgtggaagaacaggttcggcagccaatctcctgggaggagccctctttggtggaaatttggacacacaggaagagcacacactggtggggccttgttccctgcagcaccatctgggtgaaaaggaggccagcatacgcagtttggaagcaagaagtcacagcatgaaatatgcaggacttccctctcctaaggcacagttttcccaggttcaaaataagcagcgtgatgtcctctgcccacccaccccctccttttcttgtagtgtcccttatctcacttaacaaagtgtgggctctcaccaaaccagagagccttcctgaaacaggcagagagagcactgctccccacccctcacatcctccctaccctttcccccgacccccctcgccaagccacagagggagggcagttcccagggtaagcctcgtgtaccaaaaacggtctgtgctctgcgtgtgcgaggattgagagccacagtggactaaagccaggagacttggtgtcgagttctagctctgccaccaacatgttcagcggcttggagcatgtcacttggtgtcaccacgcctccgttttctctct

SEQ ID NO: 49 - DNA, 2566 bp, Homo sapiens
ggaagcaaagtttaataattgaatagctcaagcactaaactcttacatattattaagatactatcctaatatgtctcatttgtcaaagatggaaaagttttgatatgacataagggtttcaatcccaataggaatattaatggtaacaataaaaataacatagcaacacggtttctgttgaatgcctgccacatgccagcaactgctttgataattaaagaattatatcttatgttgattataatccttataatggcttcctgggtaagaaaggtttattactgttttacatttgaggaggagactagggttcagagagggtgcagaagtgagttacacttttgccaaccaggccagaagatgaaagccgctggattgggaaatgcttttgtatcaaaagcacaaaatgaagtggctagtgttacttgttggaaaaaaattaactttggcaagcataaatataattcagtatttgagcaatacttttaggagggtaacagagtggtttatgtgaattctccaaaatgccatcatgaaaattttgatgatgaaaatcacctaaaattgctaattacctgtcttagcctgtctagggctacaaagtaccatatgctgagtggctcataaacaatagaaatttatttctcacagtggaggctggaagtcagagtgccagaatggtcgagttctggtgagggctcttccaggttgctgtcaactctttgcatccttaggtggtggcaagagggctagaaagttctttggagtctcttttattgtattttattttttggagacagtctcactccgtcccccaggctggagtgcagtggcgcgatctcagttcactgcaacctccacctcctgggttcaagcaattctcaggcctcagcctcctaagtagctgggattacaggtgcccaccacaacacctggctaatttttgtatttttagtagagacagggttttgccatgttggccaggctggtctcgaactcctgaccccaggcgatccacctgcctcggcctcccaaagtgctgggattacaggcatgagacactgcacccagcctctggagtctcttttataaggatacttactattctcatccatgaagtctccactctcatgacctaatcacctcacaaaggccccgccccttaaaaccatcacattgggcttaggatttcaacatacaaattttggggggacataaactttccatccctaacattacccaaatagtatctatatagtcatttctaaatatacacgtatttagaaatttctaaatagccagtaaacatacaactgacttggccttgatataactgttttcattttcttttattttcattctacatgacatattttgggtaattataaaataattaaaattagttgataaagtatggaattagaataaaataattttctattactatctaagccatgaaatgaattaggagatgctgttttcagtgaaacgtcttctagtttttaaagtgcattgtccaattcctttttattttgtgaagattttaaaaacttaaaaaaagtcttcaaattgtttgtgccttgcatttctttaaatcttatgtttaaacatcatgtgctgctagttgctagtcattttctctatcccctgccccagaccctctctttctcaggaaaggatatccagggatccgggtcccagttagtcaaggagatataagaggaaggctatgaggctttctgggaaacattttctttttccaagagagaagtgttcagagggaaaaggtcctttctcagtttggctccctctttgtgttttagatctggtcatgtgaggctgcctggcttggattgtgagggcatctctcgacaatgaagtgacaagcctggggaggaaaatccacaggcgagaaggtggcagaatggagagatggtccttcatgacttctttgagtcaccaggtccagatttcccgccaacctccagtcttcttgttatgtgatctgatatcattatttactgcagaggccactgagtggatgctcttacttgtgtctgaaaatccaattcactaaattaatcaaaatacggcactcttcttttgaaaccttgctccagaacaaagtggaaggtaatgatggggtgcttttcaaagttccagggaggtgtccctacacagcagacagctgtccaaaggaatgtagatgttggctgcggggagatctgagttgccagactcagtcagaacaggtgtcctctcccttattttatcttaaacatgcatgtcatttttgcatgctactctatgcggttctttcagccagggaacattgctgagcacccgctcacgtgctgtatggagcgcagactgcagggtgcgaggggcggaggtgatgtgctaggcctgaattcaagagggggcgcagccacaggccccgcgatgccggggtggcctcttgtaacgacgttttaaccgctgacctaagtggatccgctcctctcccgggtgggcgcaggagagccacgctttgctctcccaggtgagccgccgctcgctgtcccgg

SEQ ID NO: 50 - DNA, 575 bp, Homo sapiens
agaagatcctgccctaaggagcaagtgtgcggaggccacctggccttcactggttcctgcactgaatgtttccttctcacctgctgagtaccaggtgttaccccagagatggcagaaggactgaggacctggggaggagagaggaggaaactggaggactgtgaacgtggccacgtcttttccaatggagagaaaactcaatcggatctgggcactccctacatttctccacctcctgccgcccccgtgagccactgcagggagatttttctgaataatggaacattttcctgttttaatcagatgcaattttgcaagcagtttttatgatttagcaagtccattaaaactggcatttgttctgctctgacactcgaaaggggctccacagagcataaacattggaaattacttgtagggagagacaatattaaaattccccagcctgggcctgttgtttgagaaattctgttatcaagcatcatgccagctacgatcagaggtgcttgagatatatgctgcttcctctttacgcactaactgggggcctgggaactcaggcagcaataaagtcg

SEQ ID NO: 51 - DNA, 2823 bp, Homo sapiens
gatgggatttacatctgaaaaaccaagtgagaaactgaagaccagagagggtgagtggtttactcagtttggcacaactgaccccaacctagccctccatgaggactgagcgcatgagagatcctgagccacagccgcccagccctgctcctctcgaatttctgacctacaggaactgcaagaagtaatgaaagactgctgtttaaagccactgcattttggcatgatttgttatgcagtcgtagataaccagaaaacatcggatttacattttaaggtaaactttttattgaaacatcacatacacacagagacgtccaccaattggctcgatgagctttctcaaaggaaacacattctctgagcagtgtgcacatccagacacatcatctccatcctccagaagccccctcctgttatcgccactcacaggtcacccgtctcctgacttgcagccacagagatagtcctgcctaattctgaacgtggtacaaacggaatcatacagaatgggcttggcttctttcactctgggctgtgtttatgagcatcacccagattgctgcatggaagccatcgtttgttcattttcaccaccatagagtattctactgttgatgggacataggctatttattccttctactgttgagggacgcatagttatttccagctggagactggtatatgtctcttggctaccttctgcatgcatttctgttggaggttgtttcaggtatctcttaacgtataacagaccaccctcaaattgagtccttgaaacaattaccattttcttctttctcaggatttggtgcatgggatgggctcagttgggcagttcttctgttccatgtgatggtactggggctgcagtcattcagaggctcaactgggctgaacgtgcaaggtttcttgctcacgtggccatcagtggtgctggctgctgttgggagctccactggacttctgtccagagctcctcagctcacctctctgtatccttgccctgtggctcaggcttctaacaatacagaggctggattccaagaggagggaattagaagcgttcagccttcttaagaccaggattcagatgtcccagactgtcactgtattgaccggagcatttacaggccagcctagtaatttttccatcttgggcaggaatgggtggcatatgctgggggtaggggtagcattgttggggatcatctttggagctgtgtgccaaggagtaaattgctgggctgctttctacctgaggaagtccactatgcttgcttgtggagagtggattgtgtgctcagagtccacaaggatttaagaatccgagccctgctgcccttgcctcagcctgtgcattagggcccggtggtgagagcactgagccattgtgaatcaaggcccctccctcgacctgcatactaacaggccagaagagcttgcttgattttggtcctaggctcctgcctgtgggttggattccaggggcactctctcctccacaaaccagacggtggcaggtacatcccctcaatggaaattgcccacacttcaccctaaagacagatcctgctgttcagcaacaatgtgagtggcccacacatttgtccagcatgaaaccgtttgcagattcctttccagtacacagtcccgtcagccggtcacttcacgatgacagctcctcgaagcaccttttggtttgcagttgtgtagcttagaagtaggagcctgcacggcttcaggaattcacagaaggagcacactttgtgcttggagaagttaattataggaatatcctgcaacctgctgctctgagcctgtgcacctggggtgtttccctggaggtcctgtgtatgaggatactcatcagcatggggtttgggaagcctagcagtggagacaacctaggtggtcctctccaggggagtaggtaagagccctacagcagtgaaaagcattgaaggaaaagtgtgttcagcagtgctcttaatctgatcagagcagcctgaacacattctaaacacagggcatttagaactagggtagaggcactagagcaccatagatacaaactcagattctgaaggtaaatgcccaggttcaaatccaagccccctcgccaagtgaccatgactcccccgagtcacctgacctctgtgtttacatcctcaaagttaagtagtcaggaaagggggcttggggcttgccacatggatggttgccactctcctttgcaaagtgtagtccccaaaaacaggtggaagagggaagggtccaattagaaggccgagtaccagctgccatgaatatgccagagctgctggctagtgataaataactgaaacccagggggacagcagagcttgggtgaccatacattctaggaaagaaaacatgcctgttgtcctggctttttatccagcttagacaaagatgggcaaagaaaataatttagaaaatggtagagatgggcacagagaaagggcacggagggaggcacaaacagaaggccaagtgatggtggaggcagacattggagaaatgcctttacaagccggggaatgccaaggatgctggcaaccctgggagtgggaagaacctggaacacaccctccgtcagagtctccagaaggaactggcccttcatcacctttcggacttctggcctccagaactgggcaagaaaatgtttctgctgttggaggccatccagctggtggtcatttgttatggttgccacagaaaacgaatatagatttagacatctaatttgcatatatagatatgcatgtgtatttgttaaataaaagataaagc

SEQ ID NO: 52 - DNA, 518 bp, Homo sapiens
agaagatttctactcccagcacatcttgtcttctggcttcgttgcaccaaggaaggctgcgtgccttaaccatcatcagagcagggatgtggcccaggcagccacttcaaggggtatcctgttgagcaaggactcgatgagtcccgaaagcagcaaccaaagtggaaaggatcttaagaggaaaacagcaggtcacccaggagactgaccgggccccgattctgaagacattctgcagggggagctaatggcaacttggggcaagtctgattctcactcagaactggtcccaaacccccatcctcatgtcgagccaagactaaactcccacaaggatgtctgccaggggagaaggggctagtgaagaatccctggactgaccatggtggctacagctacaaaggctcctgtgggaaactggattgtcaagcaggggaggaagaaaggaaccaactctgttgagtgcttgcttatttaggaagctctgtgctggactcaatttttgctgtcgtctttag

SEQ ID NO: 53 - DNA, 1137 bp, Homo sapiens
aagagacgcaggtgctgtatgcagacatgtctgtgaacctggggctcttgggcagcaacacgttgcagcttccacctagcaagccacgccgggaccaggtcccatctgatggaggagaatcaattcaaggagatgcccttcctttacagaacaccctttaacagcatccaggaggaacgagaggctgcaatactgaggctttcaaagtactcacgaggatgtccgagaatggctgtgatgccaggcttctggcaggttccagactccatcacaagcccagcatccctgcaccagatctgacatcgctgctgttgtgccagctgtttatgaagggcctgagtagctagcaggtttttatcaggagccctgctgggggcttagacaccaaaagagaagactcatcctctgtagttcttcttgtgaatgtccttttagaaaaacaattagaaccaaccacaagcaccaaagtcctaatgggatctcctgcgagcacatatcaagcaggattgttgctatttctcctcactggctctttggacagactgtgtgagctcctggagggttccactgtatctaccctttgacactgaccagttggcacatggtgacatattccaatgtgttgattgcaaatgtgaacgtacagccagtgctgtgtgcgggaggactctctcctcctcagtggggccacaccgtgcactattaatggagccccactcctttgcacagcctggccatgcagtggctcatattgaggttttagccaactgaaatctcccgtgcatttttctgacaagccagctaggcctctgctatgctgtccttgtgtctttcatttgatgaccttaagggtgggactgttttatcttaagttacaggtggtcaagtccagcccaaggacagcaactctgagggtcaagcctcataggctaactggatagatgttctctgctttgccacccactggagcccgacctgccccactaatttatatttcccctggtctcattttgtactttttatttataattcacccttaaagtgtatgtgtctcttataagctgcctccgatctttcatggtatgaggtggttacctaaataaagaaggagatttggcctttgtttttatgtaacag

SEQ ID NO: 54 - DNA, 291 bp, Homo sapiens
gtggcttaaacctagctgtccacatttcactatctgaagagcagaaaatgtgttaataggagcctggtgagtggaggagactgaagatggagagagagcctggacctcaacatgagcatctggagccatttggcagcattaggctgtgaccgcttagagaaccgaaaggtgcagagctttaaaggattatggagtctgaagaccaaatgggatgatggagaacagctattcagtggtacaaatgtaaatgctcccaggcccgggcaggcacagcactttggaagacaggca

SEQ ID NO: 55 - DNA, 3692 bp, Homo sapiens
gagacagggtctcaccttgttgcccaggctggagtacactggccaaccttcaggtttcctcagggaagcttccctggctgggtaaagcagccccctcccctcccccacctccagttatcctccttcttgtcccactgtttgtttccttcacagcactttaacacaatctataattatctcatttatttgtttattgtctgtcttttcctctagaatgcaagttcccagagagagagagtaggcatcatgcctgtcttattcagcaccataatgctagcacctgagacagtgcctgccacttagtaggtgttagacgtgtgataaataaaaaagtggacaaattatctcattgaagccccacaataacctttggtgatggtaagcactattatccccaccttacagaggaagaaactgaggctcagccacctacccaaggtcatgccactagaaataagtacagccaaatttctaacgtaggtctctctgactccaagtttgatggaaagtggggaccattcttttgtttgttttccgagatggagtcttgctctgctgtccaggctagagtgcagtggcacaatctcggctcactgcaacctctgcctcccgggttcaaatgattctcctgcctcagcctcccaagtagctgggattacaggtgcgcaccaccgtgcccagctaattttgatatttttagtagagatggggtttccccatgttggccaggctggtttcgaactcctgacctcgtgatcagcccacctcggcctcccaaagtgctgggattacaggtgtgagccaccgcgaccagccagggaccattcttaaccagcctaaactgcacctggttcctcttcctgtctgcctgtgtatctccactcccaacccaggcatccccagagaaacctggggcagggaagggaggaacacagaatctggaagaatgtaaatctgaccttttcttttacaggcttaaaatctgtaaatggctcctctccaacccctcaatccaagcactttaagttgaccagcaggtccttagttctggcccctgccttcttctccaacttctcctgccctcctgagccacctcacctcctcctccacctccagaccctggcacatactcctcctcagcctgcaaggctgaccccttcctcagtagcctatccctcatttgccctttgaaactcagctctggcaccaccccttccagaaagcctctagactttggagaggacagcgcctttaggtctcctgccagaatttccggctcaaggcagggccgaacacaagatgtggtcattgtttacctgtctgcctttcccacagagactgtgtgtcattcttggggtccagtaccctgtgccggtctggcacatgggaggggctcaggaaatgtttgtagaatgagttaatcaaccagtgacaggattctggtacccagtcggccaccacatctcctccaacttccttaactccagacatcttttcctgggctaggccttaacagaaggaactcctcacccttcactgtggggtcaagtcaggggtggagacaatgcgggcccctcccccgctgattcagcgcctctcctaatgaggtgaggcctcaggtttaggaagggttgccacacccactggtagggggagggtctgtgattctgtaactggaggataggtagggggcttcggttgtagactgagtagggagctgacctaagccggtagattcaagtactgcccgagagatctctgcctttccgccccacaccccagtcaccccgcgccaggctctcggcgcgtcagatcccggccctgcgttcttcatctcctgccccgccacgcccccaactgcagatccaactcgggtctctccgaaagcagcaaggagcctcggggtgggctctatgccccgtgatgctccgcgtctgggaacggatgaaggggtgccagcaacccccgccgtccccgctgtcgatccgggtttacacgaggctcatccgggattagtccctgcggtcggctaatcccagcggctggaccgaccccggggtccggagcgaggcccacacagtaccggcctagggagctagggcgcgggtcgagcaaaagcgcgcgacgctgggcgggtgtgggggtggggaggggcggaggagggagcaacgccccgggaggcggggccaggaaccggctgatccggtctctgttttccgacctctccggagcgggtgtttacccgggagccggacggaggaggccggggccggtcgagcccggaaggggggagacacacccgcccgaaaccccatgggcgggacacagtcccccctcccagagaagtccccagtggagacgccccttaagagactttctcatggccaacacaagccctcccaacacccggagacagccccgacccagggaagaaatggctccagaggccctaccctcgggagagagaggtatcccagggctcctaggagaaaagacaactcagagatgcccagcctcatcctaaagtgctgcagggcagagaaacccccataggagagatgggggtagggccagaaacatcccttcccagacgtgtttcagagatagcccccttccctgggaagagagatggcccgaaactgacttgccttaagtactcccaggaaccctgggaggaaaacaggctccccagagagcctgggtaattgggggagacatgctcccgtggtcctcagcgggaacacatgtcccccggagactcccaaggggagagatagggcctagagagaccccagaggtgagggatgcccagagaacttccccccaccccggaatgtgaaacatgcttcaaggaccctaggagagaaatatgtccccatataccctccccctacggagagacatgccctgaagtagggggatggggaccgactaggtcccctctgggaagacacagactgggtcaggctgggtttgaggggggctctcctctggccaaatgtcgcctattggtacataaaactgtacgcgacacaggcattggggaggggcttcacagacctaggacccacagggatagtccccagtgctgtcgccaacccctgcccacctttggtttcatctctccagtgcccagttggtgacagactcagtgccctggccccaaccagggggctgggggctctgtctttgcctgtgggaagggcttctcagctctcccagccatctgggccaccctctttcttctggcttctccattgtgcaaaatgctcctctgctcttctgctcagtgctcaggggtctctaagaccagggcaaggtacccaggccactaggggcttccagtgggagtccactgaccccaggaatgccgcctgtctggaccaccttctccaccaagcaaatgggcctcatacaatcttcttgcccgaatcctgacctccaggacccaggacaatccttgaggccactgttccaccagctgggcacccaatactaccaactccaagactattgcacctgccccatttgtgcaggggaaaggggctgtctctttaacaagccccaagcccatctcctgggcctccccaagggaaaggagcctttggccaacccctagacctggctgctgccaccccatcccattctaccccttcccctctgtagaagggcttcgtatgccagggctacca

SEQ ID NO: 56 - DNA, 549 bp, Homo sapiens
cttttctactttatggaaattttaacttttttattataaaggtattcagctggtatcatggtgcaaaggaggttgctgcctcccctgctttgacctcactgtcctttgcaactcttgcactgtctcatcccatctgaatgtctgcttcttggaggactcgaaataacacatttgtcaggcctctgagccaaagctcagccattgtaaccccagcgacctgcacatatacgtccagatggcccacaggagccaagaagtctggagtagccgaaaaaccacaaagaagtgaaacagacagttcctgccttaactaattaacccaccttacgacattctaccattaagacttgttcctgccccgccccaactgatcgatcgaccctgtgacattcttctggacaatgagtcccatgatctctccaccatgcaccttgtgaccccccgcctcccctgctgacaacagataaccacctttaactgtagctttccactgcctacccaggccctataaagctgcccctgtcctatctcccttcactgactctcttt

SEQ ID NO: 57 - DNA, 1376 bp, Homo sapiens
ggcatctcgctgtctgcgctgggcacggagcggcgcgcgcgcgcccgtctttccctcggcggcccccgcggctcggacccgggccggcagacaggccatccatcatccgccctcctcccgcggagcgccgcagccgccgcggccaatccggcggcaggtggggccgcacctgcgcgacagcccgccgcttccctccgctcccttcgccgcgcctcgcgtgctagcggtgcccttgtgagccactgcgttctccaaggccagaacgggacagttgacgatggtcgtacttctccatgttctgagaccagtttaaacaaaaacaaaaaccagacaacaaccttgcaagggaaagaattcagagtaaataaacagtctttttctgggaagtaaaatatttccctaagatggagaaattgagatgagagctcatccacaagattacccatcaatgagcaccaatagcaaccaaatccactagaagactgggagcttttaagtcaagaaacttacatcagtatcatcattccaagaagcggtatccaagctgttttatcgaaagtgcgcatgggagggatctcatcagagagagagacatcttcgccactgccatgaagtttcaagtacagaactcttcctcgtaatcaaactatttctatgaacaattcactcatcattgtgggaaagtctatttttcatcttaacacacaaacagacaataacaaaatttgtgatttggataatctggatctgatgttcatgctcaaaatggaggcaattcgtaatactggtctgaagcatttagtcattcactgagcagatacgttaggagcaacaggcatgggctgtgtttttctaggcactgtgaacacagcagtcaacgaagtcaaaaacctgtgctcttaagggacatgaattgccaaatggaaacactaagtttttctatttatgacctaaagctagtcaaatatctccagaagtaaggtagctgagtgaagtggttcataatctttccatgggagccaaatcctcggtgctgtgactcttttagataaatgatagtaaaaatgaatcaaaagttaattagcttgcacctcaataatccagtctccatcactgatggtcatcgtggaatctgcgtacagaggcagctgtatacagatgacagagacagctctaacacgtgacacatttaagcacacagaggcggaaggacataaagttcctggttgatttccctttggtgtttgtggggaaatatcaaggtcataaaaagtcagtttctaataatccctccagtcctccattccattccctaatttgtatgcaatggcatttaacattttgactttgcttaaaataaaatgtgtgtttgtttt

SEQ ID NO: 58 - DNA, 3509 bp, Homo sapiens
tttctggtcaaatttattacatgataaattagtatattgttatacaatcatttcaatatagagtgtataacagcatgcacatctctgtcccccagcccaagaaacagcacattcagcatgcaccactgaagctcctggagtaaacctccagccctggtcctcggcccccgcctggagaagtaaccatgtggattcagcactcctggccctccgcactgctccatactttcatactcacgttggaaacaatgagtagtgttgtgttgtttgtttgaacactctggatacaccagcatcatattggacatatacttctgtggccaggtggtcttcttccatccttatgtcttttatcttcatccattttgacgtgtgcagctctagtccatttatttttactgctctctagaactccactgttgggcactcccacattatcccctctcccatagatggaaacttagatgttttcataatgacaaacaaatgccgcagtcaacacgtgtgcacattcatgcgcatgcccatggctggaactgtggggtcaaggatgggcacatcttcagttctactcagaatgcccctttgcattccagtgtggtgggattgatgcccatgctccctggcagtattggagaattcccactgctccacccccacaccaccccactgtacaccttcctacacttagttcctattcccttcctggactcaccgcgtttctgccaccctggcctcgatgttccatgtatgtaccaggcactcatgccttggaacttttacactggctgttccctcttccacaaatgctgttacccaggtacagtcatgttctctccttcctttcttcaagtctctgtgcaaatgtcaccttctcagtgcaacctattggggccaccttattcacaactgtacccaatccttgctcctggcacttctcctttatcacctacacctttatcaccttctaataacctatgtgattcactcaccaattttatttctttgtctcttcccaccaaaatgtaatatccaggtggtgagggattgttgttgattttgtttcctggtatttcctaagttctgaggagagtgcttggcacataataggcattcagtaaatacttgctgaacacatggatggatgaatggaagaatggatggaaggatggaaggatggatggatgaagtgatcaatggatgatgggatgaatggatggatggatgaagggacgaagggatggatggatggttggatggagcaatggatggatggatagatcaatggatggatggatgaaaagatgaatggatgaatggatggaaaaatggatgaagggatgaagagtaaatggatggatggatggatggaggaatggacatatggataaagggatgaatgggtgaatggatggataaagggatggatggaagtaaatggacggatggataaatgaatggatggatgaaggggtgaatgaatggtagacgatggatgaagggatgagttgatgaaggaatggatggatgaatgggtggatggatggatggacggatggatgaagggatgaatggaaggaaggaaggatggatggatggatggatgaagggatgaatgagtggatggatggatggatggacggatggatgaagggatgaatggaaggaaggatggatggatggatgaagggatggatggattgatgaagggacggatggctggatggagtgatggatgaagggatggatggatgggtggatggatgaggggatggatggatgaggggatggatagatggatggatggatgtcttaaagctcagtcatttgtgctactattcacactggctgcaatttgtgagcttggaaaaccagtccttttttccagcctgaggtaagatctgattcttcacaaggctgtttcactactgacatgttttcatcagatacgtttgcatgttcattaactcatgtaaacattattaaaaggactatgtaaacagcttcctacacgtttcctcttgctttcattcaggtataattatatgaaaacacaatgtaccatatgtgccaacgggccattccctttcttgtgcttccaaacgacaattcccctctgcaaacacactcagataccaggtctttacatttctccttctactccaaatctaatctgccttctgaagacaaaaatctcaaagcccctgcccaatgatatggcagccaacaatgtccattctcaccctaatatggtctaggaactcactcttacctttaaaagtgctttgcaaattgtaaaagggtattcaaaaatggttacttcctccttcactgtacccttgtcacaactattcaaatagtcataaacattcaatgctgccaaacatgatggtggtttccaatcctcttcaccctacccaagtccaacatgtcacccctccaatagtcactatgtcccctcacacaggaaacatctcagaaacaggcatgagtgtcctgacagctgcagaggaataagtatgctgaaggtcactgaaagtgactggccagcagcctctaaatcagttctattttcttcctggcatactactcgtctagatcttccagccccctcccttgcagttaggtatggccatgtgaccgagttctaacacagtggttctcaaccaggacaattttgcctcccggggacatctagcaatgtctggagaggaggcaactgtggttgtcacaactagaggagagaggagagttctatgggaatctagtgagtctctgaggccagagagcatcctgctgaacattccacaatgcacaagacagctcctcacaacaataaacaccattcacaggctttgtggctttgttctaactctgattagcctttggccagctcaaatgcccatggtgccaaaaccctacactcaccctgtactaatagttgagaaacccagttctaaccaatggaatgtgagctaatgtgttggagccaattccttgcctgatccataaaaaccagccaagtgcagttgtccaagctctttcctcttccttagtctgggtggagatgatcccaggcaacttggaagccacacgccgaatacaatggggccacaaaaatgggaagagcttacatctgtcactgcttgaatgagagctgtctgcccatcagtaacacacattttacactacgaaataaactagcatgttagagatctgggtttgttcaagataccagctggcattagctaactcagtcacaaatacttttgcttgttttcttgaatagattctccaatatatggagctccatttgagccaacatcacctgggggacatctggattggccagtcctatttcaagtgggagagggatctccagggtacatttctctggaaatcaacttataactgatataacgagctggcttatgcaaagacacaggaggggtctgtgggcccatttaagtctctgaggaacttttgaaattggtcctctttagataagc

SEQ ID NO: 59 - DNA, 445 bp, Homo sapiens
ccggaaagaaacccctggaatttggaagaaaatgtctaaaagggaatggcaaggaacctgaggaaccagcgtgaggaaaacctggatgatctgacgtcttcctcactttatccctacctgtccacgcctccatccatccacccatccatcactgatcaagctctcactatgtctatagtgtagaaggtgccaccaaatgcaatggaacctcttgtctcatgtgtctacttgcatctttaagttgatacacggaaggcacagtccaagcacaggatactggaagctatggaggtacagtggcctctgagcaaactgaaaactctctatcactaaagggttgggcatacagggtatctcctctgctctgccacctaccttgaggatgctttacatgtggctaaaagtggaggcagagatatttggataaataaatgctagagaattg

SEQ ID NO: 60 - DNA, 2428 bp, Homo sapiens
ccgcccgcccgcgtccccggtgagcgctggagtggggtcgggcccgtgtgcctgcctcccgcgccctctccgaatcccggactcctagtgaaaggaagggggagggcgcgggcgcggaagggaggtggatcggagcggcagcgcggcccagccgaacgggtaccgaccgtcaccccgcgatcttcctcgcagggggcgccggcgcccaagctgctcgcccggagggcccagagccgcttcccagaccagagccgggggaggcgcagccagtagcgagccctgagcgacctctctccccactcgcccccctgccccagtgaatttctgtcagttgaagggagcggggctcttgcccggggaaaaggaaaacagttcgtggcctgggatctgggaccccttgccgcccccagcgcccctcccgctccccggcgcccttgcggcccagtggctcctgcgcgccggagtccgccgcgaagactgagcggccgcggggatcgccgcgggctccgcgcgtattcctgggctcaacactgccactatctgacacaacaggagcagtgtcgggggggtactgcgcgcccagacgtgagctgtgataggctctcgaaactgggcgcattttttttttaacctgagaattggacacttgatgaagggaaggacacggagagatgacaaacgcagactggcatgcagttgttttcagggtgggaagaacaaagtggaatgtcttcagttcttacaaaatatggtggcatttgtaatctctgagtttttgtatttggcctacaaagggggtcttttcagggaaacacgaatggaacccttcagagacatgtctacattgtaaaacaatataggatagatacggattcgggaaggtctgcaaatggttccgctcaaagaacttggggtaaagttgaccgaggactcggattctgagaggactcctatcacgttcttcatgagagttttaggctatttggactgaggaatgatttggaggtacgtcgggggcattccctcactgaggccatcagtggctgcctccctgcattggctgctggtttgagttccttcacagaacttcttcgtcaagtttttcataggaacgctgcagtgaagtggagtgaaagagactggggattgaagggtgaaccccttccagccccaatcccatcccgattcctgtctggatgcagattcagtctgactcagaacggatagttcacccttttactgatccaagtgctctgtcctctttttttcagaggaatgttctgactggctacaaacttttcttctgtcactgcaggacctcccgtggagcaattttcgataggtcttctactatgcttttttaccgcgtcattgttattgctgagaaaataatgcttagttaggaaaaaaaatagcagagcatatgagctgatgatagaagtagagatcaaggcacagaatacaatatcaaaacaactattctctgtaatcaaatgacctttctcatttgcttgtacacccagatttctgaaatcctacaccaaagtccacagagaactaagatagcatgtggcctattccccgcgcttttccagtggagaaagtagccccagaaatcagaagggtttgtccacaagcatatggctgtctgatgtcatccaaaccagaactaaagcctattgccctagtcgtttcccttctataacctaggcgtatttacagagtcttccttcctgtggtgttgtgtggattagaaaagtagctaagaaaagcacataccttattaaaattcactgcaatagatgataagtctgtagaattatagtgcagtagaagtttacctgtgagatcatctattagaatcccatctttttaaaactgaggaaacgatgcactaccccaagccactaagttaattcaaagccaggaatagatgctatgttccttgacttcttatccaacgttccttccttgtatgtagcccatctctgaatcatgagaggggagaggagagaaaggaaaggagggatattctcactctcttacatatatatgaaaaaatatatatgcctctgtgtgtgtgtgtgtgtgtgtgtgtgtacacacacccataataatgtttcagtgaacaacagaccacatatattactgtgatcccatataatataatactgtatttttgctgtacattttctgtgtttagatacacaaatacttaccattgtgttacatttgcccacagtatttagtacagtaatattctgtacaggtttgcagcctagaagcaataggctaccccatatagcctgagtgtgcagtagcctatatcatctagatttgtgtaagtgcactccatgatgtttgcacaaagtcgcctactgatgtatttctcagaacacctccccataagctaattgacgcatgattg

SEQ ID NO: 61 - DNA, 1049 bp, Homo sapiens
cactgatgctgggccaacaattagccccatttgtacatttttacaaaccttttggcaatttccaagaattgtccacctcccctccccattgaactaaagaaacttcttgtctcatggatactcagaataccaatcaaggcaacagatgcttttattttaactaagtacacagtacggatctcacagggacactccttatcccctgcagagttccagacactactgatggtgaccaaggcaacatttcatcagaaaacacagtgctgggcttgtgaagaaggtgtccagtagagcttccactgcccctataggctgcaggcagctgctttagttgagagactgagctcctcaaagaattcctatttaagttacaaagcagcgagtggatgccctgctgggttccactgttgccacagcctttgattactctaagttcatgctccttaggaaagtgcactttttacaccaatgctacacagttctctcagttgcctttactggtcatcaaggagttcacatttttgacaaccattcagtcctggactgtccaaggggtggaggtagctctgtacaggaagctgcctgctgcctgtggatcactaatatcagacttgcccaaaaactcactgaaaccactcatgaaaaccaatgcatggggaatgtgtgacgttacccagatatttacgaacacgcttgtgctgccagagaccccagatctctaaaccaatgcatggagaatgcatgacatcacccaaatatttacgaacacgcttgtactgtcagaggcctcctatcttgccttctgctaaacaaatgggggcagtagctttgcatcggcttccgcatttcattactcgtaactgtggtcttcctaatttctcatgcccaagcacttattacagtgtctctacagccttctctcagcctcttaaaatattagtcatcattaaaataaatacccaatgttaaagcatcagatgtcaatttgtattgtgacacctaaaatttcatgctgcaccccaccagttcctcagcctaatggctttcac

SEQ ID NO: 62 - DNA, 828 bp, Homo sapiens
ccgttccaccttactatcaaataaccttaaccaaaccatttacccaaataaagtataggtagaggcgacaaacctatcgagcctggtgatagctggttgtccaagatagaatcttagttcaactttaaatttacctacagaaccttctaaatccccttgtaaatttaactgttagtccaaagaggaacagctctttggacactaggaaaaaaccttgtaaagagagtaaaaaatttaatacccatagtaggcctaaaagcagccaccaattaagaaagcgttcaagctcaacacccatcgtctaaaaaatcccaaacatacaactgagctccttacactcaattggaccaatctattaccttatagaagaactaatgttagtataagtaacatgaaaacattctcctccgcataagcctacatcagaccaaaatattaaactgacaattaacagcccaatatctacaatcaaccaacaagccattattaccctcactgttaacccaacacaggcatgcccacaaggaaaggttaaaaaaagtaaaaggaactcggcaaatcttaccccgcctgtttaccaaaaacatcacctctagcattatcagtattagaggcaccgcctgcccggtgacatatgtttaacggccgcggtaccctaaccgtgcaaaggtagcataatcacttgttccttaaatagggacttgtatgaatggctccacgagggttcagctgtctcttactttcaaccagtgaaattgacctacccgtgaagaggcgggcataacatagcaagactatgttactacatacaactaacatgttactgag

SEQ ID NO: 63 - DNA, 2797 bp, Homo sapiens
cctagtgagggtcagggaggcccggcccgcgccctccccgcccagccgcctccccgtcgaccacccagggctggggcgagccaggctgcctttcgaacttgggggcttctcctcttgtctcccactggtgctctggccgtgaatccatccaggcgccaggagatgacaatccggtaccaaggccggcagtacaggctgaggatggcatttctccaaaaggttgaaatatcagtaaaaaacatgcagacccaaagatggggaccaaaatccaaagccagagggtcctggaaatcagagggtcttacaacataacaggcagtacaggccatggctcaggctaggcgtggaacagactgcagttctcttctacaaatcaatctagactggacagacagaactccaagggaggaaagaaaaatgaatctgatgttacttcttgaaaccacattttctgaagtcaccatttttatgtatctatcaactcatcatttttatgtatatatcaatatgattttatgatcttattttttcctactaatgtgatgaattaccttgattgattttagaatattaaatcacttttgtattcctggaataaaccctagatggatgcttgattttttctaattccttagcaaaaatgctaatattttatttaggattttgcatctatattcacaagtgaggatttttttcctctcctgacaccaaccaattctccaacacaaactgagtgtcctacaattcaatttaattctgacactacccagagttagcattagcctccacagatttaaggcctcagccctacaagactgtcccaatcagactccagttgcaagtcctgggccacccatacttctgggcaactggttacaaattgggggttcttatgaccacctcccacaggcttgacaatttgctagaatgattagtggaaagcaagaaagtgcttaacttaatattactggtttattacaaaggatacaattcaggaaaagccaaatggaagtgatgcatggagcaaggcaagggagaatgagcacagagctttcctaccctctccaggcacaccactctcccagcaccttgatgtgttcaccaacctggaagctctctgaaccccatcatttagaggttttaatggaagtttcattacataggcatgacttttttttttttttttttttttttttttttgagacggagtctcgctctgtcgcccaggctggagtgcagtggcaccatctcggctcactgcaacctccaccccccaggttcaagcaattctcctgcctcagcctcccaagtagttgggactacaggtggacaccaccatgcccagctaatttttgtatctttagtagagacggggtttcaccatgttggccaggctggtcttgaactcctgacctcaggtgatccgcctgccttggcttcccaaagtgctgggattataggcatgagccctacatagcaatgactgattgaatctttgaacactggtgattacttcaatctccagccccttgtccctctcccctccccagaagtcagtgggtggggctaaaagttccaaccctctaatcatgcctagttctcctttttttttttttagttgtttatttttcttggcatgcagaataagagctattgtctaggtctttctggtgacctcttcatcctgaactacctagaagcctccagccactagtcatttcattagtatacaaaagacactcttgccattgtggagatttcaggagtttcgggagccatgtgccaggaaccagggacaaaacccaaatatttattttttctcataccacaatgattgacattggtctgtaattttttctgcttataatatcctagtccagtttttctattaaggttatggccacataaaaagagttgggaactatactctgttttgctattctttggtagagtttgtccaagtttatgcaagattggtattattcttttttttttagagacaggttctcactctgtcacccagactggagtagcagtgatgccatcacagctcattcactataaccttgaactcctgggctcaagcaatcctcccacctaagcctcctaagtacctgggactacaggtgcacgctgccatgccctgctaatttttaaatttttggtagaggcggtgccttactgtattgtccaggctggtcttgaactcctagactcaagtgattctcctacctcagcctcccaaagtgctgggtgtataggtgtgagccaccacacacagcccatggtattattctttaaatatttggaagaattaactgatgaagcaagccatctggggcttggaattctttgtgagaagttcttgaatagattccatttatttatgagatattggctattcagattttacttttttatgtgggctttggaaagttgtatttttcagggggtttgtctattttatccaagttgtcaatattttggtgtaaagacaataatattctcttatctttgttatatttgtgggatctgtattgatattcctttctaatattgaaaatttgtcttttttgtttctgttgatcagtattgtttggagtctatcaatataaataatattttcaaataaccaaattttgatttcgttgatttttctccattgtatatgtgttttctatttcttttctttctttctttttttttttttttgagacggagcctcgctctgccgcccaggctggagtgcagtgacacgaccttggcttaccgcaagctccacctctcgggttcacgc

SEQ ID NO: 64 - DNA, 1823 bp, Homo sapiens
gctggagctgcctgcagccacccggggactcggtctgtgcctcttgacctcccctccatcaccacaaacccagaaaggggcaacctgcccagactgcaagtgactaaatgggcactccatggcatcttagcaactctcctgccccaggcctctgtgggcagcaagaaagccagagctatctaggataaaacccaggaggcagcatgtggagataatgggcggtctgactcaccgcaatctggcagataaagaggatacaacgcagagcgtaccagcgcgcccaggtggtcaaaatagtaacatttgctcatatcctcttttcaggcagcgacctacctgctcccataactctaaatctaaggttccttgatcaggaaaccaagggcatccctgccgaattaaaagcataagcttgtgtagagctccaggctctacagtgcactggatagccttaagtagctgttgcactgttttaaaaaatactttctgttctttggtcatttcctgacccatgatgacccaacccctggtattttacgcgtgggtcccgtcctcctaatggcaatcaggactgtcccttactgggattccccaaaaattaaggagttttcctccttcacgtgcaacttcaaggcgatcacttcgggcgcaccacttgtagagtttatagcttgcagtgaacgcccagaatgagttctcagacaattccagctgagcggagcggcggaccactcttctgagagagtgtcaccccagaatccatccgccaagtatttattgaaagggcttgttaaactacaaacatccactagatggcctcttgaggtcgggtcgtgacacacctgtggccttctaaaagcattcaaaccacattctcaggaggctgttttcagcgttcctcatgacacactccactccttgtcctgttttcagggtcaaggagttacatttccatgcacaaataacatacacacagtgcctccgtctttttccatgccccgacctcaaatgctttgtatacaagcttgaatttgttgccatgcacccccaacaaccctctgcccatttggctggcaaagcaactggttgtgccctcaataaacagtactgactttgggaacatcagggtcttcctagtcttggaactctctactgttcagtttttataacaaatttatatgtaagaaatacgggtcctaggaaacagcctgaaggacatgcaatccattcactccaaattttacctctggggcaagctcaagagctaattgctaggcccgcattttttgggtccctgtataattgcctttcctgaacaatgctgtggtgttactcctttggcttacagtgaaggaagtaattagccctatattaaacttgttgttatgattactatacggttgctgctttggctgcggcccttaacatcacagtgccctaataaactgaggatccacagataaaacttcttgtgggtctcacgactaggaaaagccatgcttctcctgagctgcttctggcttgcttttcactatagactctgttaatcttgttactatatacacttcatttgtcctacctacttgtcacaaagtgaaatatgtgacttggctgtagcaattgtacagaacattatattatgcatttgatgtggtggttttccctctagtttttttcccccatgtattctttataggtttatacctgagcacttcttctagtttttattatatattttatttctttatttttatgtttattgcatgtatcactaagatggctcaaatctggttttgaaataagaaaggtctacaaataaagaa

SEQ ID NO: 65 - DNA, 305 bp, Homo sapiens
gcactattggacatcctagaaacctcattcacaagatttcaagtttgaagtgatagtgtttgctaccagagccccttttctgtcaaagaaattagaagcaggaaggttgatgcattcccccacagaaagaaaagaggtcttttagaataatgtgaaactcacactctgcatggggacagttgggctcacatattttcccaccgatagacaagagattaccagaaaaggggtgaggaatccagagagaatgtctgcataagaaggagggtggagatttcttactgaactaaaggcttcaagaattg

SEQ ID NO: 66 - DNA, 1164 bp, Homo sapiens
aaaacattctttttttttttttttttgagatggagtctcactctgttgtccaggctggattgcaatggcgcgatctcggctcactgcaacctccacctcccaggttcaagcaattctcctgcgtcagcctcccgagtagctgggattacaggtgtgcaccaccacacccagctaatttttgtattttttttttcgagatggagtctcactctgtcacccaggctggagactgtctcaaaacaaaagaaaacaaaaaaagttggtctcctctgcaaagacttgaacactaatctggtggaaaggcttcctttccctcgttttctcttctactaatccctgcttccaaattctctttctcttgtcccttgaagaaccaacaggatgtgcgatatttcaagaacgtaatgagcaactcctctttcacaaagggaataagcaatctggcatagcttggagtctagtattacggaaatacagtgatatactgaagactacacaccaaaatacatccattcctttagctgaagtctcaaacatgttgggactgttgccatggaatttcataaaaccttttttcctgagacagacgccatgccacaaagaaggataagccatttgtgcagtctgaggtggaacattttaattactggcagcacatagacgagttgagttggagccgaatgcataagccccttagaaataaaacactaatctaccaggaatttgggattcttggctctggtagaaatgttacaaattaagctgactcttaatttgtaaataggctccatgaagttgtccctggaagcagaatttattttccctaacataatttcttaaaaagtaaaaaaaaaaagaaggctttggcaaacagctgcatgtgccaatttgtgtgtatgctttgtggcaagatcaaaatacctttctgttttttgttcctctccaccaccttcttcacattcacaactcagtggttaaaggaaaaacttaacacaccattttcataccaaaggaatgtgaaacatgtattcatataaatactcttctgcttaatatccatacattaggaggtttaaaaaataccttgtggttactgcataatcacatatgaattaaagctagaagggacctaagagaacattgaaatctaattcctattttatg

SEQ ID NO: 67 - DNA, 282 bp, Homo sapiens
tcaaagccaggaggaaggaggagtgtgaactttgcacccagtgactcactgcatccccctagggcaagtgctctcacccgtgcagaatcctgccctccttgccactgacgggaccatccgcactgggtcagcctatgagcaacactgacctgattcacctgcacgccttcattcccccaccttcatcctcctcctcgcagaggtgatcagatgtttgcaggtgcctgcctgtgtttacaaaatccatcccaggaaaccacatgacatttggtcatctgccat

SEQ ID NO: 68 - DNA, 615 bp, Homo sapiens
ccgcccccagggtgcgcaacagccacgttaaggaggatcctgcgcccggcccgcctggtgcgcacagccccgccctgaaccctgggcagcgctgacactgagctgggctggtgcgagacctggggcggggccactgcacccagcaccctgccctgactgtaaagtcaggcggcctgctcctgttccgcctcctaccggcccgcctgttttttcgcctgtggcttaggaactccagcctcacctgatctccgaatggacctcagctgctcctgcgccactggtaaaggatgcctggtttcgggtcttaggatcttcattttcataccacagaatagaacatccctggggcaggaggcaggtgcattttgagctcttcctaaagtggactcctttgctttgcacttctcgagctttctccccgccaagagccttcatcaccacttagaacattgccatcttcctagtgcctccgatttctgaggcgagaggactgaggctgaaaactgcccggctgcaggtcaccctcaaggccaaaggtggctcctgcacctgtgccagctcctgcaaatgcaaagagtacaaatgcacctcctgcaagaagagtgagtgtggggc

SEQ ID NO: 69 - DNA, 292 bp, Homo sapiens
caactcttgattctatcacaaaacactgcacccgaggcagccaggcagcttccgaagacctcattctcctaaacacatccattcctgtttctggcagaacttttgcaaacccatcccagttggatgcagcaacatcagaggggtgattacccccaattgccaaagaggtttccagcgctggaaggaaatttggagatcaaggccgagttggcctcagccaagtgaaatgggaatcaggaccattacaaagaaattcaattaaaataaaagacacatcataaactttgactgg

SEQ ID NO: 70 - DNA, 626 bp, Homo sapiens
cagaagtgcagctgggggccattttgtcaagaagtgcttatttggaaaaacaaaacaaaacaaaaaatgaaaaaaaaaaaaaaaatctatacaggtgcatgccagtcccccggtaatgaaatgtaacaaaggaagcacttaagttcagtgagggaaatacagctttaaattacagattgtacccagagcactttataaacggtaatgtgtgataatgtattatccttacttctgtgaaattgtggactgcaacttctgccggggccagttaaagggccaggagatggagagggttgcgtgaatgccattcaagaaaagggcaacagaggctaaggggttaaactccccagaaaaccaatttatgcaaagggctggatcctgaccggcattctgcactaaagatctgaattacaaatttagagaatttgctgctcgacaacgaatgcaggaaggacctcactggctgctgggaacaactgcccttttgaatgaattcttttatggttaccagtcaaaaagtcaccgtcagctggaactggaagggaggtgtgtgtgtgtgtgtgtgtgtgcgcgtgtgtgtgtgtacgcgcagtggcagccatttcagctcaatagctccattcctg

SEQ ID NO: 71 - DNA, 2387 bp, Homo sapiens
agaaattctttctccctatgtcccagcctacccccactttaccgaggccaacagccgcctcagaaaccagattcaggagctaacatgccccaggtctcacgaggatcagagactccagaggccagggaaggagatcaaggtagtcaagcgggggtcgtctcagatctggttgtgctcgagctatgcaaatgcctctcacggagatgcgaggacctatctattatgatgaccagggccacatccggagggggcaacagactttcatctatcagcccttttcaaccactgatctactaaactggaaacactctgaaccctgccatcttgctcctggtatcagagagccctgtcgtgcataactgtgtagaagtgttggactcggtttactccagcagacctgatctccgggaccagccttgggcatcagtagactggaagctatatgtggacaggagcagcttcatcaacccacaaggagagagatgtgcgggatatgtggtggaaccctggacactgtcgttgaagccagatcgttgctccaaggcacttcagcccagaaagatgagctcattgctttaatttgggccttagaactcagttaaggccttctacggtcccaggctttctgctgcatacactgaagggccacgaagtacagtcatctggacttggcacctggaatacaaggatggaaagcatcatttctgccagcttcttatggtcctgaggcgagacagtcatgagagaggaaaactgcaatgacttctgaccactgccagcctcgcttcctgcattttcttcttcggcttactcttgccaagttggagttgcctaacttccaagagggtatttgctcttttttttttctcactccacaaactcttcccaggtagttcagtccactcccatctaccagtcactatacgccgatgaatgccaatattattatttccagcttagacattgttcttggattgcagatgtgaggtttgacttgtttactagacattgctggctgaggatccctagcataacatggcccaaattcaatttatttccaaagctgtctcatctcctttgttctctgtaatgatgttgctatccattcgatcaacatactcagaaatatcaccccctccttccttcttccaagataagtgagttgctcacgacatgatcatgttttggcagtgtactctgtccattcccatcacttagtaagaatcatctaggttatgctgaagtatgaagttaatctccaaatttctctggctcagtacagaaaaagtccatttctcccttctgcaatgcacccaatgcaggtctgcagggtctctgctgtgcgttgtccctcagggactcaggctgaagaggcccccttgtcttatctggccacctcctctgcacatggctcaggattttccaggcaaggggttgagcagaggcttttcagtgctgggcctggatgtgacataagatgcttctgctcacagccttgtggtcagaacaagtcacatcatccctcctacttgcaggggtgctgggcagcgtagtcatccacagatcaggagagggagcagaggcaggtgttcccgggctgcagcgatctccactgcactgctgtgggctgaactgtgccctccaccccaccaagcttatatgctgccagcctcaccctccacaccttagaatgtggctgtatctcgacatagggtccttacagaggtagttaagttaaagcagggtcattagggtgggccctaaggtactctgactggtgtttttatgagaagaggagattaggacttacagggagagacactaggtatgtgagcacacagagaaaagaccatgtgaagacgagaagaaggcaactgtctccaatccagacggagatgccaggcacagcccttctgtcacaaccctcagaaggaaccaaccctgccgacaccttggccttgtacttctggcctccagaaccgcaggaaagtacatttctgttgcttaggccgctcagcctgtggcactttgttacagcttctcacccagttcaggcccttttaattgattgctgggcctttgcagttgtttttgcttctaatatattcatctctcaatttatttctggaggctgccacccgaggggcagaacttcaattgtgtccctaatgggaaaccttgctgggatcatgtggtctacagcacaaggttgctaaagcatcttctgccagaattctgtgagtatctggttaggtgggtctggaatatactgagtttaaaaaagttaaataggtttctttactgcaagatgtttcagagactttaatatgctactctgctgtatgaatctccaggcaggaaatcttataaaatgtgtttctgaaatg

SEQ ID NO: 72 - DNA, 1599 bp, Homo sapiens
gcttcctggggtctgtggtgctgggtgtgctatctgcgtgtgattctctagcgagagattgtgggcgagtgaccgagtgggcaaggggccgtcactgtgtgtgcgtgattttgacagtgtgtggtggtagcttctgactccgcgtgggtcgttgaatgtatgactgggaccgtttagcggtggatacacaactgtgtgcggctgtggaagattgcctcatccgttacgttcccatttccgtggaacaacagttttaccagaaggtttcgaaggaaccttaaagtttggaagcgtaagagtttatctgagatgggagcctcactgtattgcccaggctggtcttgaactccggagctcaagtgatcgtcttgcttcagccttgcaaaatgatggtgaagctgcatcattgtctggggtaaatacctgaggttcgttgtctcacgccaagggaatcaaggacgtggacacacaagaagtgagtttaagagcggaggtttaataggcgaaagagaaaagagaatagctctagctcctgcagagagaaaagggctcccaagtaggacttccagtccgtggcgaagggcacggggtttatagactggcttcaggaggtggtgtctgatttacgtaggccccaaagattggttggaccaggtgtgccaatcagaagctggctgccccaccctaatcttttattatgcagatggagtccctgtctgaccgggccatgttgtatgttccttgctgtacacgtggttgacaaagaaaagggaagatggagctgcgatgttggacatgcctggcccccaggtagctttttcctattggcacagctgctggcattcacccgtgcaaacttccagcttgcttatctatgtctgcagcttgatttttcaggctgctgtttgttagaaaagaaatgacttgggggctgcttttcattaaaaggaaaaccttaccggggatttccttaccctcactatctgcctaaataatttctttttaactcctatgtcacttgggattacaggcatgagccgctgtgcctgctagagggttttttatctttattcctcaagattttgcatttagataattatgttaaacttgggtgtgctaggtagacatacgtctgctgattacctgtttaggaagaatgtggattcgtacgtagggaaaaggagtcaggctggtgggaccaggggaaagcaaagagataaagcaaataagctatagatctgcattttcttcatggtccaggatatataaacaaaaaaaggaagcagataagctataggcttgcttttctttatgacccaggacatacagccctgccgagcaaataatgaacgtaactcacaaacttcctgcttatcatcaaacgcacgcatccacttatcatcaaacacctcgggtgacagaagaatgcaggtcagctccctgctgccttggcattatcaatcagcccaggaaccatcctataaaatctccagcaagcctttgtttccttgcagtcagctcctcttccactgattctgcctgttgctccctgataacatactttgatactgtctttaataaatctgcctttcttcaccc

SEQ ID NO: 73 - DNA, 374 bp, Homo sapiens
gttggggagtaatggtttgccccatgacctctcttgccataagaatctaaaagaactgtttggtttttagtttggttagccttctccttgttgttaggatgaagtgctgactcccaagcttcgtgcttgctggactggaaattggaagtctgcctgccagttttaagaacctaaaaagtgatgaactgaaaatgtcagcctgagctgaccagcgcttatcctcatgtgaccttgggtgaattaatggacatctctgaacctccattttctcctgtgtaaaatagcagctgcagcaaaaatgaaatatcaataatctctgaaaagaatttagctcagtgtttggtgaagattgcctctcctgaagtctagaaaag

SEQ ID NO: 74 - DNA, 1017 bp, Homo sapiens
agaacagccacgacagaggatacagtgaagattcaaaaaacggtggtgaatattgaaaaggcgttggaggacacataatagaatgcaaagtccacaaggagaggggctttgtgtcttgtttcacactgtgtccccaggcttagaatattctggcatcagaaggcactcagtaaacatagagaggaagaaaggaagaagatgaaatcaggagtacagattaaagtgttatctttggaagacaggcaagacatcctttgggacagaagggaaggagagaaagctggggaacatgcagataatacaagaggtgcggtttgtgactgatggctgctattttctctgtgagactgaatccagacaactttggacattccttcatttgaagaatttttactgaacaattacagaccattgattgatacagtgaagatcagaatggcatagttttcctgtcttcatggagatgaatgaatgaactgtattttttattagcctaagcatgaattcttcccaaatttcctccatgaaccataggatcctacctcttaaccattttatgaaaattctatggtgaattgaggtcctcaagttgtctgacaatatctgattttgccacggtcatgtgggaaaagtaggcatgtgagcaagtcatagttttacttgtttggaagattcttctaattatgtcaagatgaaaggttttatactgtgtagaaggcagtgtgagagaagtggacagtagaactcctatttggtgggccagtggctatattttaaaatatgaaggatacatatttgactgtttaagtacaatgatctgccatggatctatacttttgggctgctgtcttttaggctaaagcaattaaaggcaatgtaatgaacatggttatctgtggatgcccctttgattgccattgtattatgctttacactgtgatggctctctctttgaggagagacgctgttcctccagggagataaaatataaaatatgaatcttacccttaagcatac

SEQ ID NO: 75 - DNA, 1746 bp, Homo sapiens
ctttgctactggcaaattgtgtggactcaggaaagtgaccggccctctttaagactcagtgtgcttacctctgaaatggagctgtcaatcacatctgcctcacaggcttgttctgaggatgaagtgagaaaatgcccacgaggtgctggttgcagcagctggtgcatagagcttaaaaaggatgcagtcccaaaacatagaaggatttactccagatccaagcaatgagtcaggaacagaaagcctgatgccctcacctggaactctccctcctccctggatgaggaccttccccagaattgcagggcacccacacaagaccaagcaagttcagagaaaattgaaacctgactttagagcctctgggatgttcactacacctcattgaacctgtttggttcacagtagagctccaactaccgtctacttcctgcaactggcctgctgccaactccccagatctcttgtggagctgccggaagagacagcctgccacagaagaaagcagccctcctctttcatggcctcccacatcttgaaacaaacacaagcaaacaaaacaaaagcttgagtcccagcctgattcaccaggtttggttcccaattgttgaaattcccttcccagggctctcagaaccagggttggctggaggggtgaaagaggctggccctgagcccagtaataggacaccaagggggagctaaaagctgggatctggggtgaagatggggtcttccaagctgggaggcagacaccaggccagagcaaccggcctgccccagctcaggcctcttaacccatgcagggcaagagtataaacagaggccacggaccacatgcctcagtatttaaacttataaatcaagctaacataacatgaaatcaaatatgttctatcctcctagcttgacaaatactttcataacgagatggaatgccaggttcagatttagaattttcacactccttaaagttccaagtcaaaatacagcattaggggagggcccccaacctcgaggtctcccctcccccattttctttcactcccagctctgtctcacaccacgagggatcttgggtgaatgcccctcgataccccagccccccacaaacagctgccctttccccccttggccaagggtaagcacagcagcagggcagtctgcccttggctggagagatggaaggagaggccacacgggccctgaaaatgcatttggggactcttgggcaggaaacttgggagtttctggagcctcaaggagggtctagtgggacagagccacttgggcccatgagatccttgacccatggagaagggtagggctagaggagggccagggcaggccctatgaacagaagaacctagagtaactgccctgtccccagatcctgtcaccgagcaggtatacttgggagggtattggagggtggaacccaagggagcttgcccaaggcactaggaaagaaaagtgtaaaccttgttagagaatgctaaggatagctgttaaagcctcagagattttactcatttttggctgtttctaaaaatcttcccccaaaggaagatcttgctctcattgaggatctgagaaagaattctctccaagtagtttcaaaacattctgatgtaaaaactctggtgtgttagtcaaaaataaattttgttgcttgatggcttcaccattcacaaaatattctatccatccaatttaaaaataagagcagggtatttaaaactcttt

SEQ ID NO: 76 - DNA, 626 bp, Homo sapiens
gaaatccttctactgcttccatactgcctcagggcacaaagaattgctgagcagccatcggaggtgatacgtctctagagatataaacagctccctctcattaggatctggtcacttccctgcttcttttctggaactccacttggaacgaagaagaggcactaggtgcatgcctacacagaggaaagccatgtgaggacacagcgataagattgctgactgcaagctcaggagaacttagaagaaaccaaccctaccagcaccttgatcttggacttccagcctccagaactgtgagaaagtaaatttctgttgtttaaatcacccagtctatggtagtttgttatgatgacccaagcagaataatgcataccatgattctcttccattctctcaactcaggacatcctttcccagtgttggggtggtggaggggaatgacatagatgttcgtggatggagagaaggccttcctgttgttaagacttttttcttagctccatcatccatgtgacatgcccttgcattctttttagtgtctgggccagtctgccatggcttttcagaaagcagggcccaagcacacctttggattcaacctgagtgggttctaaccaagaatacca

SEQ ID NO: 77 - DNA, 403 bp, Homo sapiens
gtgagcaccagggaataaaggatggagaaatattttgaatttttcaggacaatatttagtgtgagtaaatttagaaggcacaaaaactgaacagctgaaatgatctgtgagaagatagatattgtcatggactgaagaccaaggttacatggaaagagaaatggactggataatagttgaaaagattagacagcaaacatgtttttcttttaagaaaagataagaagattgattgaggtcaaagtgcaatgagtcaaggatagtgacaactggaagaacaggaagcagtttggcggtggcggataggtgaggcacaaggacgtcagcactggattcagacaaaccggcgtgtattgcgcgtgtactttgggtggccctgtgctgcgtcagctggaagggatcc

SEQ ID NO: 78 - DNA, 290 bp, Homo sapiens
gtcgcatccaacttactccaagttttctggctcaactccgaatggattggattgcgagtctgcacgtgagaaaaccgtttggcttggcttggacccctgccgccccccacctcctccacacacacccagtccaggggtcccctttatcaccctttgcttgcaactccaaaagaagttgcccacctcctgagtcacaacacaaggtcgaataattcctctagatgaaagatcagtttcatttcaaaacgagaataggttcctttttttattttctccacatggtacaaaat

SEQ ID NO: 79 - DNA, 685 bp, Homo sapiens
ggcgaaggtctgcagcttcactcctaaagccagagagaccacaaacccaccgggaggaacgaacaactccagacgcgcggccttaagagctgtaacactcaccgcgaaagtctgcagcttcactcctaaagccagcgagaccacgaacccaccaggaggaacgaacaattccagatgcgccgccttaggagctgtaacactcaccgcgaagatctgcagcttcactcctgagccggcgagaccacgaaccccaccagaaggaagaaactccggacacgccgcctttaagaactataacactcacggcgagggtccacggcttcattcttgaagtcagtgaaaccaagaacccaccaattccggacacagcaggatcccacccacagaaccgccaggtgcacagctgcatatcctcaggggaaaactcccctcccctgccaccttactgataggcttcacttcccagagaactttcccaatcctgtgcaatgcctgagtggtacattgtattctatgagaatggcgcccccgcctccagagttgtgcaacaagacttccatgaatcaaagcccatcgctggctgcctcctctagccctgcatagcccagaagctacaacctcagcccagattagcaggctgaggggtcaggaggctgtcactggagctgttgagctcatgaacacg

SEQ ID NO: 80 - DNA, 355 bp, Homo sapiens
ccggtagagagggtgctcagataaccgacagcgtttctcccaccctcatcactgtccgacttaccccgggctggcatcagggagtgttgtcaggcgtttatgccgttatgaatggctttatgatacctcgagagggggaccagggccaccggcttcatggtggctattttctgaaggtggcaggagaagataaaaccaaaattcagggtttgctttttaaataccatgctagtaaaatcagaacagtaatgacgggaaccaaaagatctatctgaaatgttcctaagccagacagatgtgaggacgcacaatgtaaacgttatgcagcagctttgggagaggctttttatggctc

SEQ ID NO: 81 - DNA, 329 bp, Homo sapiens
caccaccgaagcataatcttgctgtagacatgattgctttgggcgtaggctcccatgtcagtgccaaaaacgctaagacttggagaaaggagaggagaaagtagagctacttcctctgtatgctttgctgcttggaaaggagacagaaaaacagcaggaaatgctcacttcttctcttgggatctttcagggacctcccacctgaacaggacgattgaactttgctttgcgatgacacaagcgacatcttggaagaggcaaaacttgagacaggtcttcaaggattggtgccatctggacaggttgaagaggagtaggagggctttcgg

SEQ ID NO: 82 - DNA, 811 bp, Homo sapiens
agaacgcaaaagattcttcaaaatcaaactgtgtccggaattggtgggttcttggtctcactgacttcaagaatgaagccacggaccctggcggtgagtgttacagctcttaaggtggcgtttctggagtctgtcccttctgatgttcagatgtgttcggagtttcttccttctggtgggttcgtggtctcgctggctcaggagtgaagctgcagatcttcacggttgctagtaacacaataataaagctgctttattttccagtgaagatgtatgtgatagggagtggaggaagaaaaaggccagaaaattccatagttagcaaatatacctttcttacttaaaattctttttccaatgtgagccttctaaagagttactgagaaattaggtgagctcacctcatttaatgcaatagatatgtttctgaaaaataagcaatacataggacattggccaattaagaattctgatgaagaagaattttcacatccgaaagagtaaaaatgaaaaacggtacaaatgtagtggcttttaaatttcaaaacaaattattttgataagataaatattcctctcataaagtgaaaatggaagagactgcttgctgggtgttcgtcaaaatggagttagatggtctgtcccagactcccctgttgttagttctgagaacagaagtaatggtgcttcttcaggactggctcatagaaacctgccgtgttcagcccccacaatcctctcccttctgctggctggaaacaaatgacaacgaagcctcacgtcttggagaaaccacactgctgaggaactc

SEQ ID NO: 83 - DNA, 550 bp, Homo sapiens
ccagaggctgggtctaattagttgagaagcagtgacacccccaaccactccccaaacaggctggctcccgtctccaggccccaaggagccacacctggaccagaccccaggaaagacatgtggtggaaaccctacggccctggagcccaaggagagcaacggctgtaacaagtgcacaggcaagggcgctagctggtgggagccaccccgccatgctgatgtcagagaagcaagaactctggagaagcagcctcctgggaccagaggagggccagcagcaggcagcccggagacagaactctcacccacgcctctccaagcctcccaacagaagacagaggtcccccacagccagagacatttcctgaagacatggggaacacagaggcagaaacagcccatccacccaggagctgtcccccacactgccgggagccggcacccagagccgccaggtaaaactgaggccacctggttcaacatcacctttcacagaaggggaagcagccacagaaagaagggcctcgttaagaagtggaacctgggaccc

SEQ ID NO: 84 - DNA, 6792 bp, Homo sapiens
atcttgacagttcacgtaacattcaatcaattataccattgctctatctctaaagttttctttttctccttttctcagtgtcttaccaagaatgaaaggcaacctatgtaaaaactatgggctttctagtataaataaaaactactcatctccagaaaataaacaatgactgctaagatgattgaaaaaagaaaggagaagaaagtagcttgtaaaagcgtgtgaaatgcattcacgttggaatctcctacaggcacttcagaagacgaagtgctcctgatggctgctttcaatcactggaagaaccatgaaagtgcgagagattcctcccggtgaatgaagccagctcaccaccgtcaagggcaagggatcagcgtgtgttcacatggaggcctctcaccgagggaacccaagggggacagcacaggaattgcagagccagcacccatggaatgggcagggatttgggtttcatccaaccagccagttgatcaataatcactgaatgtctgtcacccattgcatcctctcctgagtagtgaggctaggccagtgccagtcacctggaaatccttactgttctgcagttgacattttgagaggcaagtcaaacaatatatataaacaactagaatgtctagtgtgtttcaggaggtaaatgccgtgccgggatgagcagaaggaggatggagccgttgctgggcagatagactgattttagataaagccgtctgggtgcaggaaagaagaccttaaagagggaatgacatttgagcaaagtcttcaacaaactgaacccaggaagaaaacattccgaaagtcagagaaaagaggaagtacgaagggccagagccagggaggacattggcggagatgcagccgcagaagcgtcaggggccctgcagccgcgatgcaaacagagaagtgggcgcatggagcatacggggcagagaaccagcaccatctgaatacactgcttaggctgttggggccatggcttctctcgataccaaataggaggctgtggacatcatcttggcaggaaacgacagtggctaggaccacagtagtcaccgtagagatggagagaagtggccagatcatagatacattttgaagattaagcggacagaatttgctatggattagatgtgggtgaaacagagagagagagagaggatagctccaacatgtgctgtctgagcagctaaaggggtggagcaggatgaataaagtaaagaaaagattgaaatggagacgaagggccactgtaagtgagacatccagacgcagcccaatactcccaggggagcttgcttacggcagattccagtcacaagaagcaccaaaaatgtctcctctttcatttatacatgacgcaaaatcaagaggataagctgctccaatttgaaagccacacgttcctttaagggcagggctgggcgaatgggttcaaccctgactgctctccaccgtccatgcaggaccacagcctagggtgaagggggcccttctctgggtgttgctgggagggagaaatattcctgagatgagcttaagacacagcacttctcccctgtggtgtgagagccactgtgcctacaaggacactcacagaagctgtcatttgggattcgctgccaagagcagagcacggctgttgatgcgtcgaaactgaaaagccttcttcagctgggtgggcaagacggctgtctatggagaccctcctgagtacagatgcacctgcttttagcctcacatagacgggggctctttaggactgtgggctgaccctgagaagaagccccatggaagcctgcttatctccaaatcccccgtcctttctcctgaaagacagtctcagtgagtgaagttctagcattatagatttgttcctttgtaagtctgacaggatttatggtttgcaaacattttttatgagaatgaaaattactttgggaaaagtcattcatttaccacccttactagtccttccataggaactgatttcctatacgagcttgagacatatttggaattgggcaaattcctgcagagggtaagaggaccaggaacaatgaaaaagtgtggctgtccatgcaggtaaaagggccccacaggctcatgtgaattactttatttaacagcatcctctgctgttgctgaggagagaggagtggccctggcttctcagtcatattttccagccctgacttgtttacctgtctccaagaattgacccaaagtaacacctttaaaatggaatttattctctcctctattttaaataacacctggatgaatgagagtctttacaacagatacgactagaaggagagacgctaggaaacacagagggaaacatgggtcatttgcatctgcagctgtgtgtgtggcagctcaacactggaagctaagttttcctattcaggaagatgaagctctcggtgtctgtgccccatcccatgcccctggctacctattcacatccggggccaattagtgctgttgaatttattccaaaatcctcaggcaaaatagaactctttttgattaccttggagttgacttctccctagttcctctccacaatgatttcttgcttttcaccgaaactctttgagaagttctatttttttgtcattggtcagagcagcattttattttgcatttcaattcaatttttagtgatggattttggatttttatgttcacctgccaactactttaacccagaaaatagcagcattgagcagttcctgacgtagcggaggtctaccagttgtcatacagtatcagctgccattaccccttctgttgtgtggtcctgagactggtgtgcaccttcacagctcaagggtcagtggttgctgcaggcaattctgctgttggataaatgcttagccctttgagctttacatatttttaacagaagatcaaagaagctgaaagagtgatggaaattaaactggtcttatctatctatattttaatgactgacttggcatcctagtgtggtagcaagaactttggactgaaaaaaatatcacttcacagctgttcggctgtgtgacctgaagcttttttttttttttttgagacggagttttgctgttattgcccgggctggagtgcaatggcacaatcttgactcgccacaaactccacttcccgggtttaagcacttctgcctcagcctcccgagcagctgtgattacaggtgtgcaccaccatgcccagctaattttgtatttttaacagagtcagggtttctccatgttggtgaggctggtctcgaactcctgacctcaggcgatccacccacctcggcctcccaaagtgctgggattacaggcgtgagccaccgtgcctgaccaacctgaagcaatttaagtggactttcaaattttcaattttcccattgggaaagtgtaagttttgggaaaagtcagtagtttttacattcttttgttctgatgacgcttttttgtaaaatccacatgtggaagccattagatcattttgtggggcacagtttgaagaccacaggacttcatgatttctgagatctacccattcttccaatcccagcttccagcatcctctgggtacatcagaacctcccagtaaaaggatggtgttggcagctgtcctggaaatgctcagcctcgctgggaatgggtcccctcttacttgctgggtgaccgtgagcatgttgatcccacctcagagcccccgcttcctcctcctctataaataggaccatggatagtagcttggagaattcaataaaatatagtgtgctgaacactcagcacgtgcactaggaagaaccaaaaatgagcagaaccctcactgatatttaatgtcccctaatttgtcaagggacattatattgcataagatttgctttaaagaaagtaaattcctttcaggcaagttgtttgagtcaccaataggtttaaatcaaaggaagtttttgtcctcacgattttgcattttttagtgcctttccacaacaaatgtataaaaggagcattatttttaagtgtaactattttggaaacttcttacttaaaagcaattttctactacaagtcaaaggattaaagcaaaaaaaaaaggtgaatctgcagcagcatatattgtatatgttttctagaaatacttttttaaagaaggcagagaaccctaagctaaaagcagaatttaaatttctagcattcattcagcagctgtctctataaggagacagggttgaattgtgtccaagtcaagcatcagatttccagggaaagcagaggagaaattagaaagtgtgcaggaagcagcagaaatggctgttaaaaggtgatagccttctaaaattgacaagacttcttgggtcagataacagatccaagggctagaggtctgaattcaggcatggtcgggggaggaggagggggaagtgtacagaaaaagtgggtcagtgccaagggcatctcagcctgtttggaggaattcaaaatcatttaggtaaagggttagaggtcagaaaaaatgatcagcacagcagtgaggggtcattgggacgtccttggatggaagtccttcaacccagcagtgttgcaaggcctcaggttcccggtacctgtcagtttttgcagctcgaggaggacagcctgggatctcaagcttatgtttcataaagttgccatcctaagctttggcatgacaaagtctctctccttgacaacgttccttagggccttctcagcccttttctcaatgaggattccacgttggctcccatcctcgctgggcctgcatacctccttttcagcaagaatcctgctgaggcagtttcacaagaacttcccacccttaatgcctgatcatcacaggcatcctatcaaatttcatacccctttctttgatgccttatcaccttggcctgccttcagcaaggatttgttgttattttggttgtcatttgtttgtttgtttgttttattgaaacaaggcagattctaggctttatgattaaactctaaactaatccacaggctgagggccagatattctctcaccacaaagcatgagcacatataagttcagtcccatgccacaaacatctgtggccctttcaagccagatgtgaaatcacatcctgaccaaaaatacaatttttttaatgtgacgttttcgagtgcttttaagattttatctgtacctaccatgacattcatcatttaatcagtctcactctgccaactcaaggcgactgtatatcatgctttttaaaaccatcgaacatgctacaatgcccaaaacacatccagattgttattgcattgggtcattgcataatctttctggcttcgcgccgctgcctcctaaacttccccagccaccagcacaatctctccaggagcactatactgtccctgaaagctcctcaccccatccctggagggcagttcctgctccccaaatagctcgagcctccttgcttgtcccctttaatcccccagtgcttggggtacccatatattgacaacgggtgttaagaaacaatgtcatctaaaaccccttccagatgcaattacattttaactcaatgggaaatggcttgtcatacacttcacgaggaatatgaatgttggcattttaggaaactgcagccagtgaatatgaaagagatgctgcccaaagggctggtcatccagggtgccacctgccaaccttgtggtacgagtgtcctgggctggaggaaacctgcctctccagggacatgggaaaagaactcatcatgggaaaaagaaccatcttctgcctcaaagacagcatggttatgtaggaagattgagaagagtaaatagctccaaaagaaaaaacaaagtaaaacagaacaccaagtaggagaatatcaactgtaagtatacgccaaagtgaattaaaatccaccatggagaagaacacgcatgctgagaggggctctctccttggctctgccgtcctgaaggcagtgtggggagagaaggagctggcttttgatagcaatacggacactctgggagctgtgctgaatgtttcatactttccttaatgtaatttccacagcatcaccacaatcattactgtctctgctgtacatggggaaaagcttgagttaacagaagttaaacaattcaccagtgatcacacttacatgaaaaagccaggtattctatctgtctgataacttgagcctggccattacattcagttctgctgtctttaaaataaaaaccctggattaagtcatctctggtggtgtttttttttgttgttgttgttgttgttttttgagacggagtctcattctgtcgcccaggctggagtgcagtggcgctatcttggctcactacaagctccgcctccagggttcacaccactctcctgcctcagcttccaagtagctgggactacaggtgcccgccaccaaggctggctaattttttttttttgtattttcagtagagaaggggtttcaccgtgttagccaggatggtctcgatctcctgacctcgtgatccgcccgcctcggcctcccagagtgctgggattacaggcgtgagccaccacgcccggcctgctttgtctacttttattttgaaatcttggggatcatatatggtagatgtgttaaaactacaaagaaattgtcatatggccaggtctgactatttttttgttgtacttaacttactcatttatatattaaagaaaaatgggtctaaaattaattcaatttcaataagattattc

SEQ ID NO: 85 - DNA, 333 bp, Homo sapiens
cgcacctcaacctggaaggcattgcagtgggtgcaaggcaggacaagcccacggagcaagcacttcgggtcggcactcacctgcccaggaactgagagatacaaaaaattagccggacgtcctggcgtgtgcctgtaatcccagctactcagaaggctaaggcaagagaatcgcttgaacctgggaggcggaggttgcagtgagccaagatagcgccatggcactccagcttgggcaagaagagaaaaactccatctccaaaaaaaaaaaaaagaaaagaaaagaaaaaaaaaagatctgcatcctttgagctcacaccaatggatgagaaag

SEQ ID NO: 86 - DNA, 240 bp, Homo sapiens
tttagagatgagggtctcatccttttgcccaggctggagtacagtggtgtgtatgtagcacactgcagccttcaactcctgatcctccaacctcagcctccacagttgctgggattacaagttcaagttggtgtgtatctgcaaaggcgatggaaaggagttcttacatatgcatattctgaagaaggatgttacccttactgaaaaacttattccaagatatgtttaatcaatcatgag

SEQ ID NO: 87 - DNA, 374 bp, Homo sapiens
gacctgagactccctggggtgaagggaaatgccacagacatccatggtcttggatgctcaacagaagtgcttgccttggtgatccaaaaaaggcaggatccggccgggggcaaggtgattattctgtctgatgaggagaataagagccagtttgtggtattgacagaagaatgaaagtaaagttcaaccaatctacaaaggccaaaaatattttcacaggcccccaaaagatgaactccaatctgctgcccctaaacgcattctccactgtctggaagatgtgcaaaggcaacggcacagcgttctccatctcaaatccttcaaagtgctgtcagaataaaagaatccccaccaaaagccccagggaaatctat

SEQ ID NO: 88 - DNA, 6675 bp, Homo sapiens
taagtgaagttccttgaaagcagcacacaacttttctctaaagctgtgaaattggcaaaggatatagtacaagaagaaaaagagaatacagatgacatcgggggtccaagagacattccatatttaagcttcataatgtccttatttgcacacatataccacactgccttcattttctccagctgatagatttgtgtaagaaatcttgactttgagagttcaatgtcattcccaacagggtctttatgtctgtctggtcatgttatcagccagtcttacttaatgtattaggccagttggaaaccatcattaaagaaactgaccctggtgatcaccagagtagtttcagactataaacaacacatcataaatcccactgcccttatcttggcccaaagacaaaactggacattctgatgaccccagagattatgacagtgttttctggtctaattaaaccatagtcttcatatacctttaccacgcctccttcctccaattaggaagctaagtgggtaagaaagaaaaaataaaggcagagcataacgatgtcacccatctttggcctcttagccggagctgatccttacatgggcagtagactataagtgtgttaattatttttcctactgcagagcttcttcacgttggaatggtgaataggtacacatttctcaaagctcaaagtgcaagtctaggtatattctctagtttcaatcttggtgaaatttttttctatgaattcattactttttagtttatttcagggagggggtggtgttttttaatgaattaatacaagtgtcagcatctttcatggacatccagacaatttcttaaagatgggagaggtaaaaaatcttcaggagaaactgtgcctgaactgtgagtatccagaagccattgaccatgttaatggtggagccaatatgaagtacttgctaaatcatgtggtgcgtgaaaggaagagcaatgttataattgcatcctcctaaagactacataaccatcatcactcatcatctctccctggtcccttccacctgccaaacccccataaaaacccataattgatgatacatattagtttataattaacggcgtacctaactgttctctactagtctgagcctctgtacagagaaatgtcagttttgtattcctggttcctggaaaagtacatatagaatagtataaatacaataaatgtttgaattatcgtataacttgagtctaaattttaagttagtatcctgtattaagaactgggttgatcaaatggttctttctttgcacatatcaaggctttcgactattcccaaccaggtcttcccaaatttgggcatattcctgcctctgcctaccctgttctaatttggcactctaaagatagttcataaaaagcaagccaaagatagaaaagagagctaaggctacaggaggaatttactctttaacatttgggggaaggaaaatgaggcttgtctacagcagggactggctgtcttccagaaatggtttcccaaggtgttccctacctctctttttcttggatatctttttgcattatagatagccttgggaagggtgtcacctttatcctatcagttccacctaatcaactgtagtcatctgagagccagaattattattgatagaggggcctgggaaaggagaaaaggaccaggagagaggaaggtatacttattgcagaggagaaaagccaaagaacgtttgcccatgggcagtcttagctatttaaaatcacccacttcttcatccggctcccttggcatatgtatcagcccatggattgggaggtgtaggaccattctttttctttctggaaggaaagcactgacatttaagctctgtgcggtctgctcaggggctgcccagtttgtccaagctttaggatattagagagattacgcatttgtggtctcaagttaggaaactgttgaagaacaaatatgtcccttattagagggcctctttagatgtttagggtactcacaatccttgccaacctgatgtccttggaagctccagtctggctgtaaggagatgatgaggggttctgtgtgttggaggtgatgacctcattgagtctcagccacagcagggcattatgcaggaaagaattcaatggagttatttaatacctttccctattcccacaaaaatctggaactgggttctgaactgagaagtctgggttccctgagaattggacatcagttcaaccacaggaagcctctaaatttagcactctactcacagagggccaagaaaaattcacaaatgtcacaaacttaggaacttaggtatctagtcttctctgtcattttgtaatgagaaactgaggcccataggtaaaacatctcacctccagtcacacaggtaagtacatggcagggcaaggacaggcacccagttttcccaagtccagtggccttttcatgatacccatttctgtgtatcatttcattgatttctgtgacagctggccctttgcccctcatcaccaaatcttaactctttggactttaataatgtgcaaaattaagaggaagtctggcatcgggagctttacacaactcagagagaactgaggaaagtagttagcatgttaactgtgcctcaccttgacctgaagtgaagagcactcaccaagccacaacctgctatctgcacaccccacaccatgaggtaaaggacagccaaggaagagaaaggaaagaaaagcaatccggcagggagatcagggagcgaaacgaacagagaaacgaacagaggttttttccaagggccttctatttttctacaatctccacacattcagtactgagacacattaagaagggcccactgaggccatcattcaccctactctcgggctgcttccatcctccaggcttctagaagttgagaaagtatgagcttcattgttaattatattacagaaaatgggaccagctgggttgcacccactcccctgtgtctggacctcctgcctatgtagcagaaaaggatctttctgctgaattaatattcacctcagagccctgggagatgtctgatgaaaagtagtttttgaagagtcttgtgacaaccagcaatttcggcaaagctatgtcctcaagagtcttccagatttccccaactctacagaatgcttttctttttaaataccataatcccataatctttctcaaaaattataaaactgtattttatttttctcatttatttgggagtttggtaagaaacgtttgggaagaaatgcttttatggagaaactactcagatttgaaactacctagtttatactaccagaagacagagattcaggttagctagtttgctaatcctcacagtttcagagatatgccttgtatttttccagattataggctttgaggacattcaccaatagcatcctcctctgaatgtattttggtccttttgctaagctatgtcttattttatagtcctccaaatgatgatctatgacttctctgcctgctcattagaggaagaaaagctcagatgcattgctaactattatttcaatgccagtggaactggagaaatgcttgaaaaagtaatctcaggttgtaaaaaagaactatctttttttggttgcaggagctagaaccctattattctgagagtaaattttctattattcctatctaattcattttcttgggagatgaaactccctcttttttttggtggggagacagggtctcactttgtcacccaggatgatgatgatggagtgctgtggcacgatcacggcacactgaagcctcgacctcctaggctcaagcgattctctcacttcagcctcctgaatagctgggaccacagacacacaccaccttacccagctaattttttgtatttttttgtagagacagggttttgccgtgttgcccaggctggtctcgaagtcctgggctcaagcgacccgctcaccttggcctcccaaagtgctgggattacaggtgtgagcccctcactgctcctggctccctcattattatatttcctgaagttgacatgatttgggtcctttacttagaaattgtcatcacacaatttcagaaaggtaaagaaatccatttttattggcaactttgggctatgcttcatcctggcaaaaatttaaaagcagtacacttcgacgtggctcactttcctgcacacctcaggcagcttgtacagactatccaagaaaaaatgaggaggaaagtgctccatcaaggaagagggatgagatgggagcataattcacacactaagaactgagttctaaagtcacttgagctttctggagctcagttacctgtaaaacaaggaagaatgaatggtctttatggaaaatgaatggcagaataagtgatttgtcaagttcattgaactataaattccatttttactgtcatttatttataacaaagttcagatataaagaaaaatctgaacatacagtaggcacagataaacctatagcaaatattcacatgtggtttgaatgcatttattaatctctgtacttattagaattaataataatactaaaatgatttggagaattaatgattaataacagtggaaaatagccttcccattattgttagaggatggtgccatcatgatgctaaatgcctatctgaggggaagctcataaatattacttgacaatattacttgataaatatttgttgaaaaaagaaatgtagtaaagaagcaaggatggctgggcatggtggagcatggctgtggtcccagctaacttgggatgctgaggtgggaggattgtttgagggaagctgagtttgcagtgagccaagattgcactactgcactgcagcctgggtgacagagtgagaccctctccaaaaaaagaaaaaaaaaaagagaaaaaaaagaagcagcagcaacgaaaggagggaggaagggagaaagtttactttgatatgccatatgattgaaacaaatgctcttttttcaaagacaaggattatactcctttgcattccagctactttggtccattgtaacttggtaacctttgccttgaaaacaaaaagaatccctggatataatctccttccttgtaattttttttataagatgccagtatggtaataggtccattagcaagtaagtacaggcacatcttattttattatacttctcagatactgcattttttacaaattgaaggtttgtggcaaccctgcatcaaggaagtctgttgacatcatttttgcaatagtatgtactcactttatgtctctgtgtcacattttggtaattcttgccatatttcacactgtttcattattatctctgttattaaaatctgtagtcaacgatctttgatgttgctattataattactgggggcaccatgaaccacacttatataacacagtaaacttaataaatgtgtgtatgttctgattgctccaacaaccaacctttctccaatctttctccttcttctcaggcctccttagtccctgagacacaatattgaaagtagatcaattaataaccctaaaatagcctccaggtatttcaagtgagaggaagttgcaatctttcactttaaatcaaaagctagaaatgaataagcttagtgaggaaggtgtgtcaaaagctgagacaggctgaaagctaagcctcttatgccaaacaaccaagttgtaaatgcaaaggaaaagttcttgaaggaaattaaaagtgctactttgtgaatgcatgaatgataaaaaagtaaaacagccttactgctgatatggagaaactttgagtcatctgaatagaagatcaagccagccacaaaattcccttaagccaaagcctagttcagagcaaggccctaactctcttcaattctatgaaagctaaagggaggtgaggaagcttcagaaaaaaagtttgaaggtagcagagtctggttcatgagtttgaagaaaagaagccttgtgcatccataaaagtgcaaagtaaagcagcaaatgttgatgtagaagctgcagtaagttatccagaagatctagttaagataattaatgaaagtggctacactaaacaatagattttcaaaagagatgaaacagccttatattggaagaagatgccatctcagacttacgtatctagagaggagtagtcaatgcctcacttcaaagcttcaaccaacaggcttactccttgttagaagttaacgcagctggtgattttaagttgaaatcaatgctcatttaccatttccccaaatcctacgacttttcagaattatgctaaatctaatctgcctgtgctctataaatggagcaacaaagcctgaatgacagcatgtctatggacagcatggtttactggacattttaagctcactttttgagtcttactgctcagaaaaaaaaagaatcttttaaaaatattgctgttcgggccgggcgcagtggctcatgcctgtaatcccagcactttgggaggccgaggccaaagtcagtagttcgagaccaccctgactaacatggtgaaaccccatctctactaaaaatacaaaaataagctgggtgtagtggtgggcgcctgtaaatccagctactcaggggtctgaggcaggagaatcacttgaacccc

SEQ ID NO: 89 - DNA, 685 bp, Homo sapiens
agaggacaaaggccacagagcagtgcgctggctgaggcatgcgattgtaaaccaaaagctcagtttccatttggaatggcttccggaaggctggaattgaaatccaccagtgcccatttcaaggtgctcccaacacagcctggaaaaaaggagcccagatacgcttccctgtggacgcaggtcagtcatcaggacgcacagaaacagcgttgcccttggcctggagccattgtcctgaaaggggatccttcccaactggggcctgagactgatccctgagaagtggcccctccatcctggaacccctcctgcttgtgtctccttacttcctggtgatcaccgcattcaggctcagaatgccgcaggcctatcccactggaagctgccaaggtgcccagcgccctgttgcactcttgtcccacaggacgccaggcacagcagcagcatcaagggaccagcagggaagaggctgcagtgatttggggaaacagtgtgaaaatcacctggggcctggcgacacggggtcccgcctcctcccccatattaggtcccagagaaaatgacaatatgaacagctcatgtcaccattattaggcagagtctttattctttccttaatctttgccattaaattgagctctataggaccattttctgcttttaatgccaataaatgaaattccag

SEQ ID NO: 90 - DNA, 1207 bp, Homo sapiens
caaacatgtaatcttttattcagtacactctcaaaacagcatttctgtatctagttccaagctgggtgatcctgcggccccaaaggtagtgatgactctgctgggaggagacacagacctcccagttcagtggatcccgagtgagtcagaaggtgagactggaagcagcagggtccttgagggaagtaggctctccttgaaggataagcaatggctgcatgaagtagcaggtattgaagctagggctttgaaggatgaataggagcttgccaaacaaagaaggtgggacatgcaaaccaagtggagggactgtggcccaaactcagggatacatggatggagtagcaggagaaaaacagactgggggagcaggaagagtcagtgtgagctttctccagatccaaaatcagcagcctgtcattcaaggccaagacattccacaatagttccccttggccctgtcaagcctatcaggcctggagcttcctcaaagcagctctgacaactccagccactgtcatctcccctctttgtgtcacgaggaccatgcactttggtgcatggtgacattcagtgggggctgctttcctcggtgtggctgtgggaccttaggcccatgcctcagtttcccaacctggaaaatgggctgcaggaagccacttttgcaacttatgtttatctcaggccagggaggtcttggacaaatgatgtgaaggaagaagagaaaaatggaagatagggagggagaggaaaggaagggggcgaaggaagggagaacagatgggaagggaagggaagggaagggaagacggaggaaggaaaaggccgtgcacctcccgacccaggtcatcatcaagggacaggtccaacattattatttcagaacatgccagcgctgtcgaggcttaagaaatgggtggtgatttgcatgcgatttgcatgtgatttgcatactgtttgttaaatgtcaaaacaccctgaaaatgctttctcccacctccacccccagtggagaagcgggaaacccttccccacttcctccaccagctcccggcatgggttggggacgcctcagttcagagggtggtgaccttgggcaagccaaaagccatctgtaaaatgggctgttatcctggcccctgagcagtgaggctgtcaatcttttttttttttttttttgagacggagtctcgctctgtcacacagg

SEQ ID NO: 91 - DNA, 4113 bp, Homo sapiens
cttggcgttcactgcaagctataagctctgcaagtggtgaccccgacgtgatcgccttgaagttacgcgtgaaggaggagagctcattacttttcggggaatcctgagaacaggaccagtcgttggagaaccaaccaacaatgatggtgatgactcggaaggcacctgacatcacctggggacagctaaagaaattgaatcaacaagcatctatccagcttgccgccgtggaagcccctgcaactgcagacaatcggtttcttacatatctggtggcaattggggaaacttctgagaaagtaagacagacatggatgttggggtggcaggcacttgcagatggctctgtgctgccacccgacgcatctatgaccagggaagaatcatggaagcttaccttgcattggatgaccagcacgctataagaattaaagaaggggggaatatggcggggtgcacgacagcatattcaagcttatgtacaaggcgtttgaggtcggggcatggaaacatactgaggcactgtgtgtatgttatttgtgcatgagaatgaaactccttgaccctgaaaacaggacggggagtggagtgtgtggtgtgataaggaacgctgaaaacagcctcccgagaatgcggtttgagtgcttttaccaggccacaggtgtctcatgacccgacctcaaaaaggccatctagtggatgtttgtggtctaacaagccctttcaatgaatacttggcggacagatgctggggcggagtctcttagaagagctgcccccggcccccctcagctggatttgtctgagaactcattcttggcgttcactgcaagctataagctctgcgatgggccctgaaaaaaaaaaatcgatactacgatgactctcatatgtatttcttcagcccagatccagacctttgtctactcagcttctccacgtggatacctaataggcatctcaaatttaaatatccaaaaccaaactcctgacattaaacacaagaagcaagaaatatgaacatattttctgattccactaatataaaagtacataacagtcaacaccaaaccatattattcttatttcttgaattgaacttttattttaagttcagaggtacatgtacaggtttgttacataggtaaacttgtgtcgtgggggtttcttgtagaaattgtttcgtcacccagtgattaagcctagtacccattcgttatttttcctgctcctctccatcctcccaccctccaccgtccaataggccccagtgtgtgttgttcccctctttgtgtccccgtgttctcatggtttagctcccacttgtaagtgggaatatgcgatatttggttttctgttcctgcattagtttgctaaggataatggtctccagatccaaccatgttcctgcaaaggacctgatctcattcttttttatggccgcatagtatcccgtggtgtatatgtaccacattttctttatccagtctaccattgatgggcatttaggttgattccatgtctttgctattgtgaatagtgctgcaatgaatatacacgtgcacgtgtcttgataacagaatgatttattatattcctttgggtatatgctcagcgatgagattgctgggccgaatggtatttctgtctttaggtcttcgaggaatcaccacactgtcttccacaatggttaaactaatttacactctcaccaacagtgtataagtgttcctttttctctgcaacctcgccagtatccattattcttttactttgtagtaatagccattctgactggcgtgagatggtatctcattgtggttttgatttgcatttctctaatggtcagtgatgttgagctttctttcacaggattgttggccgcatgtacgtcttgttttgaaaagtgactgttcgtgtcctttgcccactttttaatggggttgtttggttttttccttgtaaacttgtttaagttccttatagatgctagatattagacctttgtcagatccatagtctgcaaaagttttctcttattctgtaggttgtctgttcactctgctggtagtttcctttagtgtgcagagctctttagtttaattagatcccatttgtcaatttttgcttttgttgtaattgctcttggtgtcttcgtcatgaaatctttgcccattccttatccagaaaatgattgcctgggttgcctttcagggattttatagcttggggttttacatttaagtctttaatccatgttgagttaacttttgtgtatggtgtgatatagtttggctgtgttcccacccaaatctcctcttgaactgtagctcccataatccccacgtgttgtgggagggatccggtgggcggtaattgagtcacgggggtggatttttcctgtgctgttctcatgatagcgaataagtctcatgagatctcatggttttataaagggcagttcccctgcacatgctgtcttccctgtcgccatgtaacgcacatcctttgctcctccttcgccttctgccatgattgtgaggcctcccaaggcatgtggaactgtgagtccgttaaacttcttttctttataaattacccagtctcgggtatgtctttattagcagcaagagaacggactagtacctggtgtaagaaaggggttcagtttcagtcttccatatatggctagccagttatcccagcaccgtttgctgaatagggaatcctttccccattgcttgctttcgtcaggtttgtcaaagaccagatagttgtaggtgtggggcctcatttctgggttctctattgtgttccattggtctccatgtctgtttttgtaccagtaccatgctgttttggttagtgtaggcttgcggtatagtttgaagtcgggtagcgtgatgcctccagctttgttctttttcacttagaattgccttggccattcagactctttttcagttccatatgaattttaaaataggtttcctcgtactgtgaagaatgccaaaggtaacttaataggaatcgcattgaatctgcaaattgctttgggcagtatggccactttaatgatattgattcttcctattcatgagcagaaatgtttttccatttgtttgtcacgtctctgatttccttgagcagtattttgtagttcttcttgtagagatctttcacctccctggtgtggtgtattcctgggtatcttggtgtgtgtagcaattatgaatgggactgtgttcccgatttggctctctgcttgactgttgttggtgtatacgaatgttagcgatttttcacattgatttggtatcctgagactttgctgaagttgattatcagcttaaggagctttggggctgagactgtgtggttttctagatttaggaacatgtcgtctgcaggcatactgtagtattaaaagaatgtaatataggacataggacagaaaaacgtagagaaaaaagaggaaagaaggatcacaaatgtaaatgtgttggtttcctcttgaaggaggaatgaggctgagatcaggcagagacaccccaggagctttggggaatgctggcggtgttctcctctgtgacatgggggtgtttctgtagaggtgcccttgataatcacttattaaacaacacacacatattgtgaggttctctctatgtatgttacatttcaaaataaagaggggcaaaattgctaataacaaataacacacatttgtagttaaacacttctcacaatccacagacctggaaatgactgattagttttctgtatgtgtagttttccagttttaagaatgttctacaaatggaatcatacattatgtagagtttcatatttggtgtctttagcacaatgaaatacatataagacctctagaactgcaatgtactctttcttgacctcagtactcaatacgtgttttcctcacttcacaatagttcattcacagtcgattggttttctaaacttgtatatatgtgtagtatgctttataaatatcatatgatagttaactttatgtaatttgttatatcttggtaatggacttttcttaaaaatggacagtatccctaagaataccccgtacatttccattgc

SEQ ID NO: 92 - DNA, 640 bp, Homo sapiens
cagggactgcctgtggatccatgccaattgctgtgatcagccagcccatccaggagagaagctgtgacttccccaagcacaccaagctgtaactctctgggtcctgtcatttgggctgatgagaaagcagcttccgaggagagacatgattcatccaaagagacgattcatgtgagagccagctttcaggccaagtattgatgggagacatctggctgattggccaacagcaggtagagaaggcaagcccagtgaagacagcatgaggagagcatccaccttttgacattgcacacaagcaaggatgacaccatgaccatctttgaaagggcagagctggacttttgcataacattattcaggttaatgacaccttggtacacatcagtcaattaaataataaataaaatgtattgactcttagtcttcaataacacctctgagacttgttaataatacttgtggattgaagatatataaacaaaatcaatatttattgaaaaaatgttcaacgtttgagaacttagattaaccttgttaattgatcctataaagtgtcaaatttttgactgatttgtttacttacatgcttgtgaaattctttgggatggatattgcttcctaatacaatgtttgtagc

SEQ ID NO: 93 - DNA, 1856 bp, Homo sapiens
gattgggctgctcagaatatttttctggagctctagcggtgcctggatgcaggggagggaatttctgggtcagaggtgagccctggcaggggcaggaagaggcaccagccagacagtgggcagaatagggaagccttgaacgccaaggcaagggctatgttttttctgcaacctgtgtctttctgtctccctctttcaggtagtctgggttggaggaggcagagccatgaccaaggggacctgggtactggctgaaggaataggctggggtagagggcacttttggaaggcacttctcctgcctcccgggagcctagatctcactccagggtctgggctcccaggtggaccatgaaaccctggcctgaccagctgatgcacactgcttcagacactcctgctggagccccagtccctgacaaggacctaggacatttttgctcctgcccagcctatcgggagggagccttgagcctttcagctctgctgtgtgactttgaggttgttgctcccctcttggggccctgggtgccctgtcttcagtggaaagcactgtgccaccttggaaagctcccatgggcagccagagggcatcgcaagaagagaagcacagaaggggcaggagagacactcagaggcacttccgctcttgcccaggacattttcccagccacacctttgcccaagccgtgccccctgcctggagcacttttcaacctcttctctgcagctccaatacacctgggattgcagtctcctccaggaagtcttctcagattccctccttcccagccagagagcacctagccttctttggggcccccacaggccctttgtgcagtgaacagccctggctgggggtgcagccagtcgtgtccgaactctccaatgactaagcggggagatgcggacatcctagctccttctcaggcctccaactgtgccccatttccacccccaaatacctccccaggaggcacctgtgcccaccccctgggctgtttcccccttccccttaaatccggatgcctcgtcttgcatagggtcttggggcagcggggaaggggttctgaagaactctggccaagaggacgaggatctgggggtggggaactgggcctagctgtgggaggtcatcgcggggcattgcagggagtgcgttgtgggaattccgggtggagaccctcagggcagtgtgccgggcctccgttgcacctctgacctgcagccacgtcatcgttgcgcagcccctggggagggtctttggggagggggtgccgaggctacgcatgtcctcgagggccgtgtacactctccaggcaccatgggcggaggcgccagaggctgggaagaaataatgttttagttaagagtcctgttggctgcaggactcagagcatggacaggtggatagtaaatcaccaccacggggacagccgtgcccagactgtgcgtttgcttagctcggggacagcacttggcccggggtctcctgctcgcctcccttcagagcatctgccaaacttcgggcatctaccctgcaattcccgcttggctgagaggagggggagaaggaggggaagagagaggagccccacttcactccggcaggcagacctgctggagctgctttgcagaatgacttgggtcttgctggcccctgggtgtgcctggaggggggtcttcctatccccctccacctctccccttggtgcctaacccaggactttgtccccagagacccactgtgtgccccctggagctcctcctagagcagagtctgctgctgtctgttctgcagagggtagcctgaggcccaaggaggttgtcagggacacacagcagggggaggcagc

SEQ ID NO: 94 - DNA, 591 bp, Homo sapiens
acattaaatacccagctcctctgcgcgattacagcagcctccggagctctcccaaattgtcacctaggatgaatatgacagcaaacaatgctttaaaatgactttgagttttatgcaatttcttgtataaaaggagagcctgagtccatggaagttgggattgaacatcctgaatatgcagttccttggagagccaccaagaaaagacctaagcaagagacatgatgtcaccttcggggaggaggctcttcaagctgtttggcatgagaagaggaggaatgaggaggatcactggccttgaacccccaaagagaggctagagcacctttctaggacccagtccagggtttgtcttgaacatccagctccaaaagagatgctgtgcagattcaagctgccaagtcctgaaggacctgagggaaaacccaaccccaagcagcccagatggtatctgagtatcctgtgccctacccacgaagatcaggagcctaaaggctagagctcactgcagaaccagaccaaagacagtttaagggccattgagccaagccttcctgacctcccatggagaggggaagagagaacaggacc

SEQ ID NO: 95 - DNA, 543 bp, Homo sapiens
tgagtgttagttttaaatagactattgacaaattacagatttttttcacgtattgaaattatattccagatgattttgagatttactggtataatattctcctcatgaggtaggatggaagggaagaaatagagaaaaaatgttctgctctgaaataaatgtggtgtttcctgacagcgtttgtcaagagatggggttccaccatgtagccccggctggtcttgagctcatgagctcaagcgattcacctgcctcagcctcccaaagtgctgggattacaagtgtgagccaccattcctgcctctatacctctaaaggtgttgaataatttgaatgggaatttgaaggtccatggcttccaaaccagcaggagttaaggcttaattgcttggaaatacattttcatggctgataccagtaacagaaaaatgtctgtatgtcaagaggctctgtactaatcagttaaccataacatgtgccaccccataccttgggccaatgtaactgttaacagcttgaagctattaaaaatgtaccaatgga

SEQ ID NO: 96 - DNA, 1694 bp, Homo sapiens
atattcttagttggggagctgcctccaagactggaatacagcatggtgcagattaagatggttttgccaaagaaaggaggctggataatggtgagcaaaaatgagcatatgtccactgcagatcacatatttgtcagatgtgaaacctaatgttatatgttctttagctaggtctgttgtcgtctggatgattatagcacaagtgaaacagaagactaagagatttgaaggcgttaatgctggaaatagtgatggatagtcactatatttctgagctagggaagaaaatgaggccagaagataatttggaaaccaggagaactgagacaagggacaaggtgtcaccatgttgcccaggctggtcttgaactcctgggatcaaggaatcctcctgcctcagcctcccaaagtgctagaattagagacgtgaggcaccacaccacctacctttatatttaagcaacagtttgactgcatacaaaattcctgggtcacatctctttgctggaggattttattgtgattgccttcttgtgtgtttggtaatccagtttgtgagttgatggcttcatcataatctgtgggagtcctctgtaccaaacttggaaagttctcctccagacaaggtcggttttcattcctgtctgtaatgttgaggcttagaaaccaattccccaaaatatggcatgtttacatcctgaactaagaagactcaaggtctctctgatctacccacccctcaccagctcttccaaagaggctcaagttcctttacctgcctaagctccagacccaccaaggagaacaatagttttcttcccttccctgggaaacctgcccaattgtcctgtagaggtgatgtttatggttctttttaataaacatagaaatttatcctcctggtcttaaaacttgagaaaattacatctgtcttatctgagttgctttctcagaaaagaaaccatcagtcctcccagacagtatcaaggagctgaaacttaccagatcatcacatctggacaaagggagccagacgcctcaccaatcatgactgcctgcttcctgttgacccctttctcttccttacccctccctaaaattcccgtttttccacacatagttacatttcttccctgctatacaaatcccaaattttagacagtcagggagttggatttgggactgatctcccatctcctctgctgcagcactggattacagccttcttccctggcaatactcattgtcttaatgattggctttctgtgaggggagcaacaggacctagactgaatcttgggtgttttggtaacatctgtaagaccgaaaatgtaaccacacctaaacagaccctttttcaagataatgactgactctctccaaggatcatttaaattccaaagagaactacctacaagttaatttctgttccctgatccagtcattctccctagcaatcatttattacccctcatctaatctaatcccaaaccctaaatctaataaaatacttctaaaatctgcacccctaatgccctcccacactcaaccattccacttactttgtaatttagagaggcctaaattttgttaaaatagaggcacagctaatagatgtttgttacacttactttctttccctttgacattttcatctaccaggcatgattacgtaacatagtcctttttttttt

SEQ ID NO: 97 - DNA, 661 bp, Homo sapiens
gcaggtttgttcttttgctctttgcaataaatcttgctgctgcttactctttgggtccacactacctttatgagctgtaacactcaccgcaaacgtttgcagcttcactcctgaagccagcgagaccacgagaccacgaacccaccaggaggaacaaacaactccggacgtgccaccttaacgagctgtaacaaggtctgcggcttcactcctaaagtcagcgagaccacgaacccaccgcaaggaagaaactccggacacatctgaacatctgaaggaagaaaccccagacacaccatctttaagaactgtaacactcaaccgcgagggtccacggcttcattcttgaaagtagaaccaaaacattggctcttcctggaccttcaacctaccagcttttgaactgaacctacaccattggctctcctggttctcatgccttcaaattcagactggtgagtagcccccatcttaaggtcatctcggggcccctccctgaatcacttcactagcacaaactcagatgtgctcaaaaagggctcattataaataggcaaagatactcctatcattaggagattctaagggtttttggagctctgtctcaggaaccagggcaaagactcaatatatgtcttatataccacagggaatattaaca

SEQ ID NO: 98 - DNA, 285 bp, Homo sapiens
cgggcctgctccacaaagtttgaagggagctcagagatgcccgggaagacggggggcccgaatggaagcagaaaaacacttatggccgctgggaagttgggagagccaggctgggactccggcaggcccagggaaagttccccttctaggctctttattaaaaaatttaaaaggaggagttgaggcgccttgaattttccttcgcgagtttggagaccagccgatttttcacgaagcaagcaaagaccgcggtcccggatcctgcaacatatacctcattttctc

SEQ ID NO: 99 - DNA, 632 bp, Homo sapiens
tcatcatgtataaaatggtgcagtaggatgcaaaatttccacttgtttataagtgtatcgccgagaaatgtataaaataatcgagaccggcggaggcaggtcagagccgtctggaatgcgcgcaccttcaaccactttgggaggccgaggcaggtggatcacctcaggtcaggagttcgagaccagcgtgaccaacatggtgaaacccgtctctactaaaaatacaaaaaattagatgggtatggtggcgcgtgcctgtctgctactcgggaggctgaggcaggagaaccttggaggcaaaggttgcagtgagctgagatcaagccaccgcactccagcctgggcgacagcgcaaaactttgtctcaaaaaaaaaaaaaaaaaaaagtccgcagtatggttttcacattatcactctcaatgccattggaggtaggtccaagctggtgtctctttgattagtctccctaaacccatctattcatttactagccattagttattctttaattgagtccaaaaatgtttgtgaggagatagtcccatatgagattaaaagaaagaaagaaaacaaaacaacaaacaaacaaacaaaacagaaaatcaggtgtagtggacactgaagagtttctg

SEQ ID NO: 100 - DNA, 1217 bp, Homo sapiens
gaacagtataaagtcctgtccccttcctgccttcaagggcacccctgaaggaccatatccactgtggacccccttgggatcagccgaggtctgtagaggtgacattgcagcccagcacctccctcctccgccctgccctcctctgtcctccttccacaggtgtggccaagggcactgcccagttggcctgtgacccccagctgaggctgcttcctgggcagctgacttcaagtttgtgacctgagctctccaggcccccgagcggctggtgccttggccctgcagttctgcggccaagactcctcctctgggatctcgtcttaccctgctgcgggtgccagggctgcatgaagcaagggcgaaagtccccttcgcccgggcgctgccctctgcctgctgtcccctgtgctcctgttccccgtggctgcccagggacaggtgtgtgggatggaggacgcgggagaggctgagtcctccccagtggacccccagatgcagaccctgaggcaagggagagtgagaaagtgaaggaaagaacacagctggaaatgcaaccaagaaggaaccccagcccggaccactcttttcacactctctgttgcccttgtccttgggcatctcagtgactcgaaggaattgggtcttgagacacagccgagcctgtgagcgctgacctgtgtaaagaagacaccagaatgagatgtctccacacacagagagctgcagccgatgccggccggtgacttgggacttggatgcttaacaggaggctccccctctcttgggaggtagagagcagtgaggaaggggactcagcctccatgcctcccgccagcccagctgcgcccgaatcacctccctcctgaaaggatgtcagcctctgcttggacaccgtggagacagggccctccttgtgcttcagaagcatcaacgtgtcagaaaatcatcttcacgccaagtctggaaaaaatggctttgaggttgtgcacacaaaggaaggagggagagccccaggtgtcgcggaggaccatgcggctgacagagccagcagggcggtggcgtgtgagccgtgctctggatatataaggatctgacgctgctggcaatgtctgagctctatgctcgcccatctgtcggctgctatcatcaccgggtgggattagcggagatccactctttcatatttaaatcttcacaagagaatgaatcacttttat

SEQ ID NO: 101 - DNA, 2705 bp, Homo sapiens
tgtataacatatatatgtccatatatatgtataaccaaaccacaggtgtttttttggaagtcatattatacagggagttgacagaggtgtgagctggactttaagaagctgcacataagatgctagtatgatcaagctggaatggacttagacaatttgaaacaacttttctcagttttcagatgaggaaactgacgggtaccaagcttaaatgacttgacgaagctcatagaagattagcaggtagtagaataatgactgctgactcctaattcagtggatcttccctggccaccgttttgtattgagctgcaatgcttccttgactgttctccatgccagattcttatcaatgatctttcacctaagaaacagcaaagattctggcaagcacacgatctagagatacatcttattgcgatttttcacaaaaatcaaaagaagaaagaaggcttagctggtgtttaattattgttatttttttcaatagggaaatctgtacacaatgatttatctccagtgatttgccattgatcaatttttttctcatttcattttctatttttttgttttttgtttttctttattttttatttttttctcctttttctttttttaaattttctgtttatcacaaatgatcatgtaattatatgttaatactatgtaaccccagtgttttcaactgtttgtgattcaatgttacccagttttcttttcttaattttaaataaatttgaaaaattatcttagagtgttttgagcctgtgttggtacatttagttctagttcattgtggtaaatccacttcagtttctaagtttccaccctttagtaaagacatatttctaaatttggtttatatcctcagttacaaaagattctaactgctagttttgtgacagcaatcacacataccatcaagggatggggcaggcagttttggaatgtgctgatgctagcatttttataagcctatggcttttatagtctaaattgttcttatttctattaatgcttcaatttttgacaaacacacaaccatagaaacaaataataaatttgttttttgggaattatccaggattcttggttaagtggggaatttaggctttgacagcataaaggatcacggataagtatttttcacggtggctctaattataatgctgagcatgtggcaggcacagaaatatttactcattgactgaatatagcacatcgtaatgttgatttttttccaacataattttagagctaggcatattgtattctattacactagactatatatcattcttaaatagaaccagccttgctagataacacatgttggaggagaggcccttcttcttagccctcagtgtttccatctatggggaagaagttccaccatactaacattactatcgtctctccacctgctcactcacttctccccaagggaggggtgttcgatatggtttctgagcttggaaagaaaactcaggcatgtgtaacatggttccttcagtcccatgacccactgtccacaaatgggctgctcacagagtgcatgccttcacccttgttcctggccatgcaggaaattgtatgaaacagtcctagctgaagcctgagattttcctgcattgcctagtcctggtgggtatctgtctactcctggagtttggattggaaagtccacatgcctgaaggtataaacctattctacaaaggggtgttttctagaatgaaggtaatatttttatcttacatttgcagaaagagacagaacaatgttataggtgagtgcatggacaatgacctcaaacagctaagattcaaacccctgcgttgaatgattgaattgaaatgattcaatgagctaatgtacataaagcatccagaatgttgcctggcacaaggactgtattgtctgctagaccatttattcaaagtgggaggatgatgttctaaaagccaatgataaagctcatggcaatgcagggtatatctgatggcatggaatgctttaggatggccaagattgcccatcaaatgccaagtcaccgaagttattaatggctctcctactaggagcctgacatcatggtgagcatcgagaaaggaataacctaagctgaagacacgccttttcaggaggccaagttccacgttctgccaggcactactctgtcccaacaataagccctgtacattgggaaaggtgccgagacatgaactttggtcttctctgcaatccatctggagcattcactgacaacatcgactttgaagttgcactgacctggccagccctgccacttaccaggttgggctcttgagtttctgctttcaagtgaccctcagaaattcctccattcactgcagaggttctgtttctccttgctttgttctgactttacggcagaactaagctaatgagttagttactatgggttatcacttggatttgaagaaccatcatttctaggcattgctgctcagagtgggtctgccctcaggggaagctgtctaaccagagcctaacccactagggttttatcagaacctaactgacctgaggaaaagaaatactcaactccagcaagctccagccttccaaatggaggaggagaaaacccaactccagcccacttcagctatcttgtcccacataaaggggaagtggaagaaacctgagaagcaggcatgaagttcac

SEQ ID NO: 102 - DNA, 2111 bp, Homo sapiens
ctccaccatgcaccttgtgactccctcctctgctgacaacagataaccacctttaactgtaactttccacagcctaccccagccctataaagctgcccctctcctatctcccttcgctgactctcttttcagactcagcccacttgcacccaagtgaattaacagccttgttgctcacacaaagcctgtttaggtggtcttctatacggacatgcttgacacttggtgccaaaatctgggccagggggactccttcgtgagaccggccccctgtcctggccctcattccgtgaagagatccacctgcgacctcgggtcctcagaccagcccaaggaacatctcaccaatttcaaatcggatctcctcggcttagtggctgaagactgatgctgcccgatcgcctcagaagccccttggaccatcacagatgccgagcttcgggtaactcttacggtggaggattcccagccatatgaagacaccctagctggacgatcagtccttgtcaaaagtctgacccctcaaactctacagcctcaatggaccagaccctacccggtcatttatagcacaccaactgccgtccatctgcaggaccctctccattgggttcaccattccagaataaagccatgcccatcagacagccagcttgatctctcctcttcctcctggaagccacaagattaggccgagagccgatcagacaaacaacctacaacccttaagctcctggcagcgcccagccaaggccatgcttccttgcaacactccttccaaatggccatcccagcatgcttccaagcaggcttcatccgttcctctggaccctcatctcttaagacctgccgcctataaaaaggattatatcttgagaccctatcctctaaaattttttccacacccaaaacaaaaaatctctgggtcaaaagtctaaaacgcttaggctggcaaccatcagatccttgcccatggtgtcctcaagcctactctcatgaaatggacaacagtacacgcatatggggccagttccacatatttggcaaccagaccagcatccaggacaacacaaagatctgcaatcagaactattgaacttctccattcagaccgccactcacacctatgggaaaagggtaatgtatcatcggcttagcaacagggaatactattcgtatgatggaaaatggggacaaaaggctttggtacataaaacattattccttccttggcctaaaaactcatcgccacctacattaaagctaatatgcctgattactgtttttagagaacttattttattagggcagttccaagctcaaaaatacgctaactggcaccttgttagctacataaaaatgcaccctagacccgaaacttactagactcattataaaattttctttaaggtgtccacgcagtccctggtcacacttgaagcagtccggagaaatatcagccctaccccagtaatccccagaaggaacttacacttttttttaatcttttcctacaacttcatattttataaataaaaagacaaaaatgtcaggcctgtgagctgaagcttagccattgtaacccctgtgacctgcacatatccgtccaggtggcctgcaggagccaagaagtctggagcagccgaaaaaccacaaagaagtgaaacagccagttcctgccttaactaattaacccaccttacgacattccaccattatgacttgtccaccattatgacttgttcctgccctgccccaactgatcaatcaaccctgtgacattcttctcctggacaatgagtcccatcatctctccaccatgcaccttgtgaccccctcctctgctgaggataaccacctttaactgtaactttccacgcctacccaagccctataaagctgcccctctcctatctcccttcactgactctcttttcggactcagcccacttgcacccaagtgaattaacagccttgttgctcacacaaagcctgattgggtgtcttctatacggacacgcgtgacaggaacctcaacccaaaggcagtctgatgaggtgtctaagataaaagtagcggcacaaaggcttttgtaaacagaggcgtttcat

SEQ ID NO: 103 - DNA, 434 bp, Homo sapiens
cgatgtcatgtggaggagccgccgagtgattgatgggccccagcttgaatggaaagtccagattccagcaacacagcttaagagatgaaggttgcttgagcaggaaatccacccatggcccaaagaggaaagatccgctttaaatgcctgggcatatacttccaagaaccagatgtggcctgttccttacacctccctgggcttagatgacagcttgaactctgcggctgatggaattgagcagatgggaatgacctggaatctaacactctacaattcagacacaccactgtccacttgtccctcccttcctgccactggccctgccagcgtaccttgtgtacttcgcaaaggtcactggctcctgttttatgtaatgactgacagacgatctcgcccagctcagcaatgtgaacagacaccttgcatggtgc

SEQ ID NO: 104 - DNA, 578 bp, Homo sapiens
acctctctctacagctgggagtgagcagtcagagagggagacagccttgcccggtgctacccagcaagctagtcaccgagtgggcagagggaggagcggccctcaccggatgtcaagcagcctgggtccccagtccagctctgcctgtccctcgcaataacgcctcagtgacgaccatttgtgagccatctctctgtctcaggcacggtgctacatgccaacgaaacctgctcccattgaaccctggccagccagtgaagaaagggttgggcctgggaggtgccactttacagacaggggcaccaaggggcagggtggcaggaggcccaccggacgttccccatgaagtagcagtaccagcatccacacccagcaggcaccacgctggcccgcagcctccctgccagcacgcctggcttcccggcctcggaacttgatctgctccctcttccggacactggggctcctgccaagtcctgggctgggcagcaactgctgaacattctaagaaatccctcccagggttttctcaggagcccgggtggggcaggaagtccccaggggctgaggggaccgtg

SEQ ID NO: 105 - DNA, 973 bp, Homo sapiens
ctgtattatgtccagaaatacacatctctatgtaaatacaagcatctccgtgtgtagcaggcatttagcctaagggcctcctatacttgcacgtgttgttctccaacctccatgccttgactttagcgcgtattacgaaggaaggtccaggaacaaatactgactagctctacgaatgggtcgagactagtaatgactcagtaaactgcgctcattacagtttcaaagccactcacaaagtacggttaactaagggtcgtcctgacacctaagggataatcaccttcctatttataaaacgctcccttttaaggaaaacaagctgcctaagagcctgaaaccgccaaggccgcacgcacaactttgctggggacacaagagagatctggccaagaccgggtggagcacgaagcctcccgacggtcccttgcaggcacctccttaagtcagaaggcccttgcccagtttctgagcagaggacagcgaaccggtgttgacggagaaaggtcagctaagccttccaggtggttactcacaaaacgcgactgcgcaaatggcttgtggggaaagctcgtgggccttgggggcaccgggagcgtagccttttggcctacgcagcagccgcccgctccgctgcgcccggggaagggacaggggccgcgctgggcacccatatggcggaggaacccggcacgtagaggagttggacctaagaccgcgatcactctcacctcgcagagcccagctacgggcccgcagtctccgccgccgccaccacaccggcatgactaacggctcttcgcgcttcttcctccctcgccggtcgcgcgggaaaggaagagcgacatcggaagacagctcttaggcactccggtggccccgcctcttccgaatcctgactgcaaagcactgggcttgatgctggagcagaaaggcttatgatcttgttgccagaaagaatacacatgaaagc

SEQ ID NO: 106 - DNA, 1894 bp, Homo sapiens
atgcgcaacccgcgcgccgtcgtccctggcaacactggctgctctagcgcctggcggggtctcacgggcgggcctgggcgcacggccaaagcgccaggtctccacccccagcccccggcgtcctgcagccggagcctgcctcgcctggctcctgcgcccgccgtccagggcccctgtccaagctcgcggacgccggcggcgttttccagctcgagtgctcagcctagggcaggctctgcgtgcgccccctcgagtgccggcctgggccctgccaggcagaggcgctcttgcgtcaggacggcgccgccggggccccgcgattccaactcgggggtcccggagcggcgcggggcggggacggcctggcagctcccagcagcgaggggcgatccccgcccgcgcagcagaccccgagctgcccaggcccttcctgcgccacgtgtacccagagctccgcccgggggagacttcgctgcttgttggagatgcccagcggtagggggcgaggactcgggaggaagataaacgggggatcccgtgtctggactttctcctccaccctcttcccttcgcagctgtgaatcctgggaggggaagggtggccgccccgccagcagagagctgaaggtgttccgtggtcagtgagggctggcactggctctgcacgaagatctcctcacctccccagcggctcctggccagctccccacggagagcccaggacacttgtccctggacacagtggtgcagccatgcttgggccaaaccatgaggccaccagaaccgcgaaaggctactgtactgagagggatactgcgagagaggcccacaggtttccaagcatccctctcactccgcacactcatctccacgaccggctttaagtgcggccttgaggcctggctccctgtttggacttctctgcacctccaggagctcacttcccgtcacagctggatgcctcctcccgcaggcacctcccgggcatcctcccgccccaggctgcaccttctgtgggactggcccccgcaggcacctcccgggcaccctcccgccccaggctgcagcttctgtgggactgagccccgcaggcacctccccggcatcctcccgccccaggctgcaccttctgtgggactgagccccgcaggcacttccccggcatcctcccgccccaggctgcagcttctgtgggactgaccttaagaccccatcggttcctcctgagagcagcagatctcagccagatgctgccgggagggaggtgctagcgtccacacccagacgggtccagtccagccctgctctccctggtctccaggcagggccctcccagggtggacattgcccatctctgcctggccaggggctgctgacccactggttccagagtctgagcctgtcctgcacaagtaccatggacaggggtcagccgggcactgaagaggcgtggcagaattgggcagggcaagggccccagctggcaagctggagtcagggcaattccaaccaagaaactgcggcaggccgggtgcagtgtctcaagcctataatcccagcactttgggaggcagtgggagaatcgcttgagcccgggagtttgagaccagcattggtaacatagagaccctatcgctacaagaaaaaaaaaaaaaaaaagctgggcatggtggtgcacacctgttgtcccagctattcaggaggctgacgtgggaggattgcttgtgcccaggggttgcaggctgcagtgagctgtgatcataccactgcactccagcctgggcgacagagaacctctctaaaaaaaaaggaaaatgaaaaataaatgggggcagaagctgagccaagcagaggcgggcagctcctcctccagggcccacctggcctgctgggg

SEQ ID NO: 107 - DNA, 465 bp, Homo sapiens
gccagacagcgccaaccacctgagacccagcctcccagcaaggttgtggcccgcagcggacgctccccacgaggtagagccccgtttccacacctggagcagctgcacctggaggtggggctcatctccagacctggagcagctgcctgccccagggcagaagccactgcccgcagctagggagcattgaggaggtctccccaggtccgcgcgggttttctccaggtcctccagtttcctcccacatcccaagtatacacctcagcctcacggcatgtctacatgggcctagtccgagtgagtgtgggtgtcccatggaggcctgtcctatccagggcgggtgcccaccttggcactgagcctccaggatgggccctggtcacctgccactctgaactggagaaagcaagttggaaaatgaatgaatacatgaatataaattatcaaataaaaattataaagcct

SEQ ID NO: 108 - DNA, 2147 bp, Homo sapiens
aggaagtgaatcttcacagggaaggaagcaacaaaactctgcctttggcttttgctggctgagcagggaaaggcctatagacacagggcattgggcaggagctagaacagccctccctagagcactacataaagcagccaatattttgcaaagcatagggaagagtgaaagtcatccggggcatttgcagacacagcactaagaacttggtgacaacagccctgaagcaaaacagcagcatgtactgggcagggcttgggagataagacaggacatctgaagctaaacatggatcccctctgaaagctacaatcaaagtgtcatccacaaaatcttatctcaagccttgactagagaaggacccacttccaagaccacagagttgaatgaattcagtccttgcagcccgttgaactgagggcctccccaacatgctcacctgcttcatcaaagcctgcgagagagagagtccactagcaagaggacattgcagtcttatctaatgcaatcactgaagtgacatcctgtcaccttggtcaccttttctattctattcattataaatgagtcccaagtcctgccacactcaagtggaggggattacacagggctggagtaccagcggtggggataatttggggtcatcttagagttcttccatcacacgggaattctcagctcaccaaatctgggattccgcatctggccattccttaagctgaaggcctggcatatttttgagtgtccatttggatcagctaataaacccagggtttgtctactggctggaggagtaagaactataaggctaattgaaatgaatctacttaaaatagtgacctgatttttctaataattactggaaggtaagggttgattgagactttaaaataaaaccaaaaattattctaaatttttcatattttatataagaaagttttgatttttactgcaaccattttctaactcttaaaataaagaaaggataattcaagtgttgatattttcccaacataaatatacaggaacataatgtagcttacttgtattttatctttgatttacacaagagaatttttatacaaatattccaggctcattagttttcccaaaggcttctcataatcctttgatatttaaatcattccctctttcaagtcattttttatctgccttgtcgatactctttttgttaatttgcccaactcatctggatcttcctttgtcactggctctgtaaatttgagtatttctccaataatgctcctgtcaactttatgaaaccctttgtcttttgcaagatttaaaaattccctttataataagcattctacagtaagtgaagactcactagcaaatatatgagtgatggatcaagagagacaaagtgttaaaaattgacagatgcaacttttaaaaatgaaattcttggttaccatctaacaaagtaagtacaggacctgtatgctgaaaactacaaaacactaatgaaggaatcaaagaaagtgtaaataaatggagagatataccatgttcatgaattggaagtctcagaattattaaaatgtaaattctatccaaattgatctatagattcaacccaatcacaatcaaaatcctaactggctgtataaattgacaagctgattccaacattcacataaaaatccaaagaatgtagaagagccaaacagctttgagaaaaggagaaaaaagttaaaggattcacattatctgattccaaggcttcttataaagctacagtcattgagtcagtatggtactggcaaaaggagagacacattctatgtatctatctgtctatatatctatgtgaaatataataaagagttcagaaatagatccacaaataagatcaattgaattttggcaaagatgaaaaaataattcaatggagaaaggacagaattttcaataaatgatgctgaaacaattagacatccatatgcaggaaaaaaatgtttgacctatatgttcattttatacaaaaaattaattcaaaaagaatcatagacctaaatgtaaaacataaaaacttttaaacttttaaaataaaatataggtaaaatcttcgtgacctacaattaggcagagttcttggagatgacatcaagaatttaattcat

SEQ ID NO: 109 - DNA, 806 bp, Homo sapiens
ccctaaggaccatagctgtctgcagtgcaggaagccaactattaaggggaaacaaaagtgttcttaggagtcctgctgtcactgtggattgagccggtgaagccctgagggatttcatcgctgaggtggatggagaagcagctgggggccttggctgtaaggacccctaagggcctgatcttttggccagaaggagattaaaaagatgcccctcaagatggctgtgcctgtcagctgcatggagcttcgttcaagtattttctgagcctgatggatttacagtgatcttcagtggtctggggaataacgctggtggaaccatgcactggaatgacacacgcccggcacatttcaggatactaaaagtggttttaagggaggctgtggctgaatgcctcatggattcttacagcttggatgtccatgggggacgaaggactgcagctggctgagagggttgagatctctgtttacttagatctctgccaacttcctttgggtctccctatggaatgtaagaccccgactcttcctggtgaagcatctgatgcacgttccatccggcgctcagctgggcttgaggacttcgcaggtgagcagtaacggaaatcagccccgtttattcctcccagcacctgccttatccaactccccacgctgtggctgagtcccagcctgctatggaagcatcactggactcccattgaactctgtgcagattcgctgttcgtagacatggtacctgatggacaccaagctacgtacagcttcaaggccccttctttctttgctaataaaaaataaaa

SEQ ID NO: 110 - DNA, 1588 bp, Homo sapiens
gtaaaaaaaaaaaacccacaaacttgccatctactatttctccaggacttggcagtctgccctcaaaagcttcagacaagattcatgagtataagcctgaaaaagagaaacctacaacacccggaaatcggcctacgtccccatataaatccctttacacctcagtacgaaactcccccattatattagaaaataaataaaaggttaccataagtaagttccagaaaaacaacatattgccgacctcacggatttttaccaaccactcgctttccctgtggccttggcacactggcatgctggtctaggatcctctacgcacaacgcctgctcgcctcctccgtgtggttgccaagccaagccgcctgctaccttcatcaccaaattgcactcgctccttcctggaatcctttttcctagcttcaccaccaaatcgttagcgctccttccttcttcctagcttccttcaccaaatcgcactggctcctggactcttttcctatcttcaccacgaactgctgcttgctcgcttgctcctcagtcctagcttcatcaaacactggttcctggaatcctgtctgctgctgtcttcctagattcactgaatccacttctgtgtagcacctgggtcagctgtcaattaatgctagtcctcaggatttaaaaaataatcttaactcaaagtccaatgcaaaaacattaagttggtaattactcttgatcttgaattacttccgttacgaaagtccttcacatttttcaaactaagctactatatttaaggccttccaaattcttctaactcttccaaaagccttctgccttagttttttttaaattacaccagtccttttagtagctttttgatgtgatttttaaccaacttccccttctagcttcaagtattcttctaaattggttctggtctacgtaaacaccctcatcttctcaagctttaccttctaacttctgcaccaccagaaattaaattgatgggcttttaaaataaattggttaccaataatttcctcattttttcagtgctattttatccaatttttggctttatatttttctatcttctatacttctccaatacttgtcttagcttgtttttcattttctatctgaaactcttgacaatattttcattttctatcttgtttctatcttccaattttcttctaagtttgtacattttgcccttagctttttgtttcctagcttgtcttttttcttctgcttcctacttttcaggtttaaatttatcttttttcttctaaaagtatgtttttatcttctaatttccctatcttctctattcttttcttcgccttcccgtacttctgtcttccagttttccacttcaaacttctatcttctccaatcttctaagtcttcatattttctcttaaaatcttaagctattaaaattacgttaaaaacttaacgctaagcaatatcttagtaacctattgactatattttttaagtagttgtattaatctctatctttcaaagagaaaaaaacttatctgcggtttcctcaagctccgcctgccccctcagcagaagcccctgcgctggc

SEQ ID NO: 111 - DNA, 575 bp, Homo sapiens
ggaggcgccgctgctgtgtcccttggtggagagggcgctgccagccctgcgcggtttccagccaggaagcttcgggaagcctggacgtctgctcactggagatgacacgtgcgtggggtgttgggaaggaggtgacttcgcctgtgatggactcccagtgtgagctgtgatggacttccagtgtgagcactggccagagtgaccaggccgaccatcaacagccctgatccagatgcagaggccaggatgtgggcccagccctgtgccagaaggctggctggaataaagggatgggcaggctggcatgggggcacccgctgcccctgcctgggtgttgctgtgtattcccgccggccaggggccactgccaggaccacccctcccttttcatatcccgattcttaagttctgctattgtggtattgtggtcgaaaaaaaagaaccgcttggctgtttttgaactgcctggaacctaagatcctgaattttttttcccccccaagggggaaagtctatatggaaaacatttattttaaaatacaggatgaagtgaattaaaagatttaaatgcaaaa

SEQ ID NO: 112 - DNA, 549 bp, Homo sapiens
aaatatttctgaattctcttgtgataggtcaaaaaattgaggaagacataattagcagctgaagaatgactcagatcatcagtagtgaataagaatgattagggggaaatagagacagtttaatcagtccgtgaccaaaatcaaacagagtaaactgtgtcatcatggagatctgcccaggaaatccccaaaatacagaaggatcagaagtagatggaaataatgtcatagaacgtctctcacaactgtgttataagaatgacagggaagctacaggttacaacagatttgtgaactcagccaagcacagtggtggcagggcctagctgctacaaagaagacatgttttagacaaatactcatgtgtatgggcaaaaaactcgaggactgtatttgtgactaattgtgtaacagggtattttagttcctgttctgtggaaagtgtaaagcattccaacaaagggttttaatgtagatttttttttgcacccatgctttgattgctaaatgtaatagtcagatcgtgacgctgaataaatgtctttttct

SEQ ID NO: 113 - DNA, 326 bp, Homo sapiens
tgaccactggcctgccccttctatgggaatcactactgaccttgcagcttattatagacttatatgttttttgcatgtctgacacccatgactccacctggaccttatggctccacccagaagcaattcagcccaacaggaggacagcttcaacccattacgatttcatctctgccccaaccactcagcagcaagcacctgttacctgtccacccccaccccttcccccaaactgcctttgaaaaatccctaacctatgagctttgaataagatgagtacgaacttcatcgcccacgtggcgtggccggcctcgtgtctattaaat

SEQ ID NO: 114 - DNA, 808 bp, Homo sapiens
gtgctgatccgccatcccactgtggagatgaaggcgtgtgctgatcccccatccccctgtggagatgaaggcgtgtgctcatcccccatccccctgtggagatgaaggcgtgtgctgatccgccatcccactgtggagatgaaggtgtgtgctgatcccccatccccctgtggagatgaaggtgtgtgctgatccccggtccccctgtggagatgaaggtgtgtgctgatcccccgtcctcctgtggagatgaaggcgtgtgctgatcccccgtccccctgtggagatgaaggcgtgtgctgatccgccgtccccctgtggagatgaaggcgtgtgctgatccgccatccccctgtggagatgaaggcgtgtgctcatcccccatccccctgtggagatgaaggcgtgtgctgatccgccatcccactgtggagatgaaggtgtgtgctgatcccccatccccctgtggagatgaaggtgtgtgctgattactaatccacatgggcaagaacaggatgtccgtcattaccctgaatcaatgctaacacagtgccacttgagttcacattaagttagaaattgagaatctaaaggtacctttattttaactaaaaaataatttatatactgtatattgattgtgacacaatttacaaagtctgaggtgtggaacagttatttaagcattagtcaaccctggtccttaagacagttctagtaaaatgggattgtatatatttgttcaactattttgaccaaaaagttcaataaattttaaatgtttaactggattttcactgcgtatttg

SEQ ID NO: 115 - DNA, 584 bp, Homo sapiens
gcctcagtccttcgccgtccctcgccgtccttcgccatcgcacgccaccgcaccccatctctcgaaatctgcagacatcttgatttttcccacgctgtctgtcaggtctccgccgccactcgacgccagggcgccgggtgagtccacagcagggcgcatggtcggctccactctcaccatcgggggaaactgaggccccggggaaggcggccagagaggtcaggccctgtccttggtgcagtgtctcgtcctctttgccggagtgagccccccaggattcgcgtgtcctcgggaaagacactggcgggccttgtgggctgtgctgcacctcggacggcttcgcaccagccagcgccctctctctcctgcagcactctgatctgcaccccctgaggggcttccactgtccgcggggtgagaatgcccctgggtaagtgccgctgcttctgcgcaccttggggaaggacccttctgtgggacgcagtagaggggacagtcaatgagctcagccagttctgagttctgagaactgtctggcaaagcgggtgcagagcaaagcgtgacttaggagacgggctgcgctt

SEQ ID NO: 116 - DNA, 369 bp, Homo sapiens
gcgctgctccagctccacgtgcgcccggggatgcaatgcagccctgcagacaagcgtctccggcaggacgtgggccgcgggtctcggagcctccttcacttaggaatcctccggaatccgccccactgcacgccagcagtcggaggcctggggcgtgctgcccacgtgactgacggccgggaaggaaagatggcggcgactatgatggcttcagagagagggcaaccaacgagaggacgccgcccgccagagcgtccacaccgccgctttttctgcggttgcgtcctgggaaggcgcgaattgtgtggctacgggcgggtcgtcctctccaccattttttaatggaaaaaataataattctcaaagacg

SEQ ID NO: 117 - DNA, 291 bp, Homo sapiens
tggctctcggtgtgtgcccttcggatggtctgctgaagagggccgccagctgacagcaaagaacaaacagaatggcagattgctaatgtttgatccaaacgaaaaagtgatgattgaatcaaacgaagcaatgtcagagaaggaagtcccttctaagaatattgcaaataaagtctctttacagactactgaaaatagagtatcttcaaggagtatcgaaagtaaagatatcttaacaaatctacagtctgacctattgtcatcttcctgcttaaaagaaagcacaggtaa

SEQ ID NO: 118 - DNA, 338 bp, Homo sapiens
ggatagtcattaccagtctctgattgagaagcagcttacaaaggtaacctaagcaaacccaaatggaccaaatgcaacgctgatggaatctaagtgctcagaccaaggaacggggactgaaataacagtggacaccacatggcatgatccaatcagattgagccctggaaagatcatcccatggcaagatccagttagattacacttcctggcatcacctcattgcaagatccaagatcatgcctcattaccttctgcctgtaaaacctgccccagcccccagctccaggagacagatttgagccaggctcctgtctttctctgcagccttgcaataa

SEQ ID NO: 119 - DNA, 442 bp, Homo sapiens
ttgcatttgccccagatgctccctggctgcgggaagagacacagcaaacagcagtgctgcggaggtatgtctaattgcagatactttttgttcatcatcgtattgaacgtcgttgcgtgttccagcagccatcaacttcctcaggaggaaaattcaattgtgcactgagcgacagcgtgaagagaccgggccaagcaggcagggtgctgcaggtcaacaaggtgctgctgtgctcctgaagccttcaggagcctcagcctgagagctcaggaaagggtggggctccaacccacctggctttccgccttactgagctccaaacacaggcttgttccacatcacggagagcccttatcctgcatgtgcgtctcgctccctgacaagcctatttgtgccttgtcaccagaaatgtaccttttttcttctctcatctgtccctgac

SEQ ID NO: 120 - DNA, 397 bp, Homo sapiens
tgaaggtgtgatcctgataaaaggtgaccaagacaaggcagtgaacgtgtcatcctgataaaagctaagggcacgccagtgcacgcctaatgcaggcggggtgacacctgcacagttccatctgctgcttcacgacgtgttgctaactcagtcgccgaccactggactctgggctgctccattcctaacttccacagtgttgatggataccgatgcaagcccttctggggaagacacagtgagagcctctctcagccatgcattcctcagcctgactgcaaggtcgcagccccctacaaagcccagtctgagtgcttcccaggctgccatgtgccaggtctccctcccacggctgtcctggaaggctctgctttgcaccaacttgccagcacttggc

SEQ ID NO: 121 - DNA, 405 bp, Homo sapiens
ttttggaaagaagacagggatgaaatataatcaagcaattaaccacccccatcatcaccaagaacaacagtatcaacaagaagaacagggacaacaaaacccacggatgaaacattcctttctcagctcagatcttatctggtgcgttctctctctgctctgtcttggtgtgtggtttagagaaacatggacaacgctgtttggaagaacagggcttcccaggaatcaacaatgcccaagaaggaagggattgtagaaatagcttaaccctttcatttaccaacgtggaaattgaagcccagggaagggaagggaccggtcgtggaagggagagccatcagcagaaagagaccctgagatcttcgcctgggattcccaggaagtccagcccgagctgattcacag

SEQ ID NO: 122 - DNA, 1836 bp, Homo sapiens
attaatctgatgcagcctccatggctcacatgatccccaccatgtatgaaatgggctgggcacccagggacaggctattctcagaatggggttattgggtgtgtttcttattcctctctacctagtattcttggaagaaggtgaatgaaaatgctctagtaggggagggaaacatgattaatgggtgggggcttatgagtcagaaagacccaaccatcacttctgccctgactgcctgtgtgacttcagaaatgggggatatcaaagcctatctcataggattaaacagtttaatgtgtataaaatgcctaacacagtgcttgccacataagcattgctcattaaatgtcttctcttcttgtgctcctcattcagtgtatagtaaatgtgcagtccttatcttttaaatgaatgaaacatctcattaccaaatctattcaaggtaaacattgatattaatatgtatcctttttgtgtgtttctagaatcctgttacacctgggatttaggcactttcaatctgaaaaaatacatatcctttcagcactctggacggacttgagaactgtccttacgtgacctaaagctggagtattttgagattggagaattaaggtaagcgactttatcttcctgatccttgtgaaaccaaaaatagcttttggagttgacgacctcctgcagcacagcttgggttgtggttcttgacctctcggtgtgtcttcctgtgccgctccaatgtgttcgggaagctggctccccataacctctccccgacctggttctcagagtctagtccacttattcattgtgcctaggaagctctccctctgtccctagtggagggaggagcccaccatctcctagtgaatgcgccacttgtagcagaaggtgcaggatgctccagctgtcttgtgaaaacatgtggagacagccttggggaaaagaggaaaaggtgaggtgagggttatataatcagattgaaacacctttgggacatccagaacatgagctcttcctcctttcccagccaatccgtgcttcctcctttcacctccttgaattctatgctccttccacactaaggctgagggtgcaggaggtaaagggttagaggttaagactgagtgcttcaggtagacttgggttttcttggttttgctacttgcctcattttggacaagtcactcagcctctcaaagccttggtctcctcattagtaaaatagggatggtattagtgcctgcctcatgaagatgttgtttgtgttgagtgagatattggagcaaaacagcttagcaggctgccttgcactgaggaagaaatgctccaaaagggctgatgggacctcagtcatgtggcagagaatctgaaagccagaagcttggcaggtctgtctcggggtggggtgacggagagacatttccctagaattcagctgctgggagcagaaagacagagcaggggcaagtgctgggtttctgaggcccgcagtcctgagcatggcctcaggcagtctgttctatgacagaacctgaagaaaggcccaggcatttgcatctatgtgtgcagttctacttgtcctaaaggcacttctcacactgggagcctgcctgtctgtacctgtctagaaatcagcctggctgggacgcacaccaataggagggcatcctcacctttcccacccatgagtcgggactgttgcctgctgtgcagcaaaggcaccaggaacacggagtcagacacttagggtctaccccaggctccacttcccactgcctatttgactctgggcaagtcttttacagcttttcaaacttctctctttcttaaaac

SEQ ID NO: 123 - DNA, 475 bp, Homo sapiens
ctgagggccagagaaagggagaagggggtggggggacagccacgtggccgcaggaggatttacaacattttctttcgccatcgatgttatcgcaaaatgtgtgagagaagcggctgcgcagcccggacgggagcgtgagggtgcgggccagcgttttccccctaccggaaatctgatgggcttatgacatcatggctggctgctgagcgatgaagtggatgccacaaagaaatccgacatatcagatagattctgaaatcggtttccctccagctgtagtaacaggcgtgaagtcaggagaatttgagctttgtttaaaaaataaataaataaataaataaaccataacaaagtcttgccctgtattaaatgcaattttcttaaaaacaagcaaaccttttggacatcattttattttaatagaaatgctgagttttatgaaactaaagtggctaataaatcagacctgaagctt

SEQ ID NO: 124 - DNA, 285 bp, Homo sapiens
ctttgggaggctgaggcaggatcacctgaggcctgaagatggacctgggagagcacgacctcgccacaacatcaccatcctgatcagaggcgagaggggacaaggtcataggtgtggagattttcaggttttggggaaagcgattctgagaactctgaaggctatttccacggaaatgagaagaaaaatattttccaaggaccaagtacccaccggccaccgtgggaaatgttttcacggccgctacactgaagtttcactgccacctagggaagttgctatcac

SEQ ID NO: 125 - DNA, 318 bp, Homo sapiens
ctgtcaccttcgactagagctgaagctgtgcactccctcctgggaaaacaatgctctggcagatgtgcaacatccacctctcactgtctacctctcagtctacttctcccaaaactgccctgcttccagggacctgagctgaagctgcacattgcctcctgaggaaaggatgccttggcgaagctcctccacctacccctcccagatgctgctacatcctgcccctctaggccagagctgaagcaatgccaggcatcctgggaaaacagtgctttggccatcgagagcagtcatgcctccccagtgcctaagtttaag

SEQ ID NO: 126 - DNA, 582 bp, Homo sapiens
caggttcctcctggtccccgaggcccccggtcgggcgttgcctgccccgcgcgggcggccgggccgagggacgatggtcagtggacggacggcgccagggagcagtgcccacgcgcggcagggcggtaccttcaggcctccaggtgtcatcgaacacccttgtgcttgctgtcacccgctgcctgtctgcaggatcccggattccgtatcaggggaccgaaattagtcggaaaataggaagcaggtgctcgcttggatggaaccctgaccctgtgctcacacttgtaggaggagggctctgcaggccgcctcccggaacgggaggttcccaagccactgcacttcggaggggctgtaattagagttgcacattcattcagttcccagtaaagtagaacgtgctccagccagtgaggaaaaggtgtttttaaaaattagattggccgagtgcggtggctcatgccttttacctcaacactttgggagacaaaggtgggaggatcacctgtggccaggagttcaagaccagcctgggcaacagagcctgtctctggggaagaataaaaaaaaaaattgagcctt

SEQ ID NO: 127 - DNA, 1087 bp, Homo sapiens
tttaaagacttcatttttggtcagcataagttttctttaaatatttttctgtttccagttggacttcactttgaggcttaacatatcaaagtgagtataaagttctacaatttagtcattgtggattttatgtcatttatgatgaaaatggaaatgtgtagttaagaaaattttcttcttctgtaacatctaactcttcatcctcatcatcttctgcttgttgatcctttcttagtcgacaagtggatacctgtcttgttccagatacacacttagctgacagtgatctctgaagaggtgactttgaattcgctcttacagtatctaaacaagatgaataatctggtgcatacagagaatttcggaaaacctctaaatcttcatcttcatcaatgttttgtatattccggtaggcagcagtgtagacctctaaagctttgccgtgaaataacatttcgattgtgataaattcagaaaatatagtctttatatccttcattttctgcctttcaaagttgttaatagtttcctccagatgacgacttgttcggctagcatccattgcagttctctgtaattccgtttctgcctgtgaaataacatgtcgatcagatgggtttcgctgacgtgttctttctaactgagttaattgcttagcttctcgattccttgctgtgaatgttgctttgaggtcatcccgtttcattttcacaatggtcccataagctttcaagggttcaactactttgggttcaactactttggcttcaagtctttcaacctctgcttgtcgataatcctgaagtttggcaaactcatcatcaaagttcatcaggcccagctttaaatgtggggtctctgtagcagcatacgcattgatttcattcaccaggtggtctgctttgtctctcagcctggcagttttccgcacataggcagcgaagatttggcacagttctccaaaatgcttctccacatttgagacagctgtttgcagttgtttcgtttgagcgttccgattttccagggtgcacctcatcatgctgcctcgcgcacggcaggggaccttgcgggggcccagtatttg

SEQ ID NO: 128 - DNA, 937 bp, Homo sapiens
gcccgccctcccctgggtgcggagccggacggcgggcactggcaacccccgggcccctggagagccccgcggcggcccaagacccgctcccgagacacgtgggcccctccggacttggttggtccctggagccagctgcgcgcgtcctctccggcctccttgtcggcgctggagtgggtccacgtctgccttgcggagcgcggtggttccacgctcctgagcgcccacgctgcgcagacctggccgctctgcgaggcgacggcagcgcactgaagaccgtggtgtttcccaagccctccctgctctcgggcctccagggcgcagcaggggagggttttgtccccgtggccaaagctctgcaggtcgaaccttatctgctatgggaaggccccgcattttcagattcacgcagggccctctgcagactgttggcagaaaaaaggtagccaccaaacacatgcataagctggacttttcccagaatgctgcagcagaactaccctccagatagacactagcctgcgggccacagtgctacgtgagtcttgcaaagaggagatctttatggcgaggctgagagcactgcctgcatgctttaccagagcccagcctccagcctccacggaaaatgtgttttggaatcaacactctttgcaaaggctccacactgctttctggtagcattggcctgggcgcccaggcactcctttagaacccacctgttccccccacccaccctagtgggaggaggagagggttacactgacagataccggcagctctgcaacccgggaacaacgcagacaacatacaactcgacagagtcacagaaggtggcgtccatcgcgcctggatggtgactactgccctgcgggctgctgggtgggtgaaacacacagggaagaagcacaaatacacacacagatgtggctcaggg

SEQ ID NO: 129 - DNA, 691 bp, Homo sapiens
gcgctgtttgcctgattctagagctcaatgctgcccatcaggtgtttgaagtcatgatttggtgaaaatgggacagtgaagacgttctgaaaaaaaaaaaaggcatatgatgaggtttggacattgagaggtataggctggctgtaggagtcgggtaagtgccaaggaaaagggcctcagggtagcttttgaatgggatttggcgacagggaaggagagaaagctttggggtggtgagaacaagggaagggaaagggaaaacaaaagcgtggaggtgggaaaggaaacctggggagaaaggtaagcgattgcctcatttggagtcttgtgtttatgtttggcttgcaaatagaagcatatataattctagggttgggcttttcttgccaaggaatggattttctcctttctgttcttaggtttatgctgtgatgcacagtgacacgtacctctctctgttcagcaaggttcattccggctattcatttaacagctggaaagttctatatctgtggcaaagatgatctgcggtggagggtttattcctggcccctggccttcctggccttggtcttttgagtgcttgccggatccctagttcctttccggttccagtagtgagaggaataaacacttaaaactccagtccaatacactctcaatgtcaataccctccctatctttaaaagaa

SEQ ID NO: 130 - DNA, 4722 bp, Homo sapiens
ctcatgcttccataatagttctgggataattctaaacacaagccatttttctaaggagagtccacattagagaggtctttgttttgtattcaagatgattaaaattatgaactgggaagttagtccctggggtgtcctggctggcctttggaaatcttcactacatctttctgggttggaattctcaccacagcctgaacgtggggctgtatctgagctgtctctgagtgctgtccatttgatatatcgagtactgggtgtttaccagggctcttcaagccactgggagaaacagctaaagagtaacctactgatttgagatgtggatttgtgccccatccctttctccttgtttcccacaggagttttatctcaaactcctaagccatttttaaggagatcactggaacaaactccaaacctaccctctaatagtcaagtttacctgaattttctcagttctctcgggagaagactaatcacacattgtagtaccaacttggactcttcatgtgcttttcttaactgattagagttaacacctcagctaaagtgtatagaacatacatggggcttcatcaggcttcagaatcagtttcactagatgtgctatgtaggaggccacggaaaaattactgtagtagtaaaagttatcagttctgatgtaaacaatcattttgtcccatattataaataaattggcctgaaaatatcttttcatatgtgaggaataagtatatgatgcctttctcctttaaagtatgaactgctaaaagacagggataacgtgtattctgtattccagcagccacagtgtgtttctggtctttgtaccaggtgctcaggaagtgttttcactggcttgggttgactacttgccatctgctctctgagcattcatttctgaatgaaaggggagaaagtgaaaggagaggtgggaagaaagaggaagctgcagaaatacgaggaaacagctggaggagggaggtgaagttgaggaggtaaggtcagtaaaacaaaaagctagcagagggcagggtcaggcccttggggtagagggctaattaacttctgtcagctagttgaatagagccttgtgtgctttgttagagaccaaaggtacttcaaaggaaaaaaatctagattcttccctgtgtaccttaataattgttcatcaggtcaaaatctatcctgtcctctaggaattctggtcttccctcaggcctagcagagagctttctgccactactcaggcaaccaagggtgaagtgcttcaagtagtatttgtggacagcagcaggtaagcttgatgtgttattcacagcttaaagagtagatgctgagtacagctgttgtccatgtgtagagcttttaataaccagcgcagcaggccccttcacctgcttttatgcctggaccagatgactgaatgtagaactttaggcacttttttttttttttgagacggagtctcggtttgttgcccaggctggagtgcagtggcgcaatctcggctcactgcaagctctgccccccgggttcacgccattctcttgcctcagcctcccaagtagctgggactacagactcccaccaccatgcccggctaatttttatattttttagtagagacagggtttcaccgtgttagccaggatggtctcaatctcctgacctggtgatccacctgccttggcctcccaaagtgctgggattacaggtgtgagccaccagatcggccctttaggcactttctacttctcaaggtcaagaaacatcctttaaaaagttaattcccttttctggagcctaagccagatcttatctaggccttgtgttgccatctgttagcattgatttctggaatggagcagctttctcaaagtttggtcttgctagtcatgaggtcatgtcagtgtcttaggtcactgctgctcaccttccttacccagggagtatactgcataggtttctgaacacctgttttcattattcactgttcctctcactgccaagaatggagggaccctcagttgaagatcaaattgactctgaagaaaaactggagatgtttctcttggagtttggatagagtattcacttgataacatgtttttcccctgccttgctcttcacaagaacatctggccaggcattaacaattagtaaatttttttgcatatgaacagtatttttctggtcatgtagatgggtgcacatgacactaaacagcattgtttagtgttatccctcttaactggtgggttgtatttggggtggaggctgtagccgaggagaagacattcacctctgtactcgagaaactttgtgtaggaatttagtttatttttttattttttttaattttttattttttactacttttactgttagcacaatgctataattgagctaatctttgtagtttggtgcaggaccaccaagtttgtgtgacccattacctactttttccatgctcagccattaccctgtcctggggcatctgagggcagtaaggaacaggtgtccaaaggaggaatgttggtgcctatgagtatgttttccagttgtattgaatttcttacttggtgtatttttgacttgtcttagtttctttccttgtggtctatgctattttacttgcgatttgttggatattctccctgtcattaaagagttgtaaaatggaagttagtttctctatgcaaatgctttaatggatgaagctgataggtttagcattgatttttgctggtgtccttcaacaagcatgaaggtgataaatgtgtttccatggctttagactcatttttgaagtcttggattgtgtgaacattcttagaaacaataaaatgttttaattaaaagccctcgactaccagctgaattcagtgtctactaggaaaatgggtagatttgttacattgtccctttgctctctatgactttgttccagttgtcaaggaacttaaatgggtattcaggaaaaagaattcttgtttccctttcctcaccttgccagttaaataactcctggtgacacttcaggtggtagaattgaaacacaaacctgacttctgaccacatgggtcaaaggcaaaaggcaaatggcttcaaagcccttagtgtgcttatccagttcaggcagtgaggagataacctctgctttcctccctgaggagtttggagtatttaaggggggatggggggggtgtcactttgaaaatatgttgctttttctcctgattgtattgaggctgatatggaagggttatttctttctggccaatactttttggtatttctaaatattgcaatcttgatttttactattaaatttgttaattgtcagttctggcttttttgcataaagagttggtccattaacttgccaatttgaagcttctaactagatattccctactgaaagttttggatttgtttttagtttgtggagcagtcttagctggggacaggtaattgacaacggcagagatactttcttttcctaggattctaagtctgtaatccacatcctcaatgtattcacaggactttaaaattctctccaaatgaggaaggaaatatcctgttgctttctaatgtttactaaaagttgtgtttagaacaacagattttaataggcatcttcctttgttatgtgtcattagccctttgcccgtttaccttagggctctttgaaggagaaatggatgggagaaaacctgtcacttggcgaaagtaaaagggataattaactggctcagagcttatgtgcagagttccaagccccaaagttaatctagaaccactcgataacaccaataaaaatatttatttcacatctgttatatatctggaaaatgttctaagcatcttacacatatttctcattaaatccacaggtgaccattgtgaggtagatattttgttctaattttccagatgaggaagctgagaccctaaaaggctgaccggttccctgatgtgttacctgcttctgctactgatccaaactgcagaacttctcattcatccccaaggcctccaggcagtatccaatggggaatcagctctaaaaggaaccagaccaacgttttccagccccttcattctggtgactgaggggaggaaagaatgggagggggtattcttgtctagtggatggaaaggaaacacactgtcaaattactatatctccttggttttctattacagtagaattctccagccatatttttattgtctatgggggaagttggagatggtgaccttgattagaagtgtctggagggggataaatggaggggataagattcagttggttttggaaaatgttaaagtcttaaaataatgcgtccatctgaagaattttttctaaaaccagagtttataaaaatatcactgatacagcctgccccctcatttccctgccacaggagatgtcttggactagagacacttgtttaataatagcttgtctctgatattcccagtagcttccctctgtgtgaggaaaggatagaaatgttcaggacatcatcatacaggctcctcatctacaaagttccagtagcagtgacgcctacacggaagacttggaactgcaaacaggctggggtcacctcagtgacatctgacgctgtccaaccagaagttcgatttttgttctgggggtgaaggaggaaacagactgtactaaaggactaaaataatttgtct

SEQ ID NO: 131 - DNA, 1002 bp, Homo sapiens
agaagtgcaactttgtaacttcactttagcctctgattgcaggccaccacttcatttacatgggtgcgttttgttcaattctttgttcaaaaccccaagaatctggacaacttgcactcaagaccctctacgggtttggcgagccagagaccatcaagcttcagatgatcatgtgacagggtttccagccagttccaggtgaagacaccacccctggccatcaagaagtcacccggtctccactagacagagtagggtgagagttccgtgatctccaaccggtagtgattatgccccaagtcagcataaagaagttacggaagaaaaaccatcagtccctctgtctcacataaagacttatggggatcacgtttctcagaggggagatgaggcaggagaatagggtctggaggcagggaacctaaggccgtttcacactgacttcttagaactaaattgaaaggaaaaccctaattttccatgcctaagtaacaaaaggaccagaggctactccctttgcaaacccccaccttttctgtgtggcatatgggaaattgaaagtacctctgattgattgttttctgcaaccaatcagatgtttgcattggagtgtaactttgtaatttcacttcagtctctgattggttgctgcagtctggaaattctgcaggccaagtcttcgtttgcatagaagtgcaactttgtaacttcatcttagcctctgattggttgctttctgcaaccaatcagatgtttgcataggcgtgtgacctttgtaacttcacttcagcttctgattggttgctttccacaaccaatcagactgattgtgggccaccacttcctttacgtgaggtgaacaccaagtggccaatggaaaacctcaagagggtatttggacctgagaagattctgtatctggggcccttgagctgctgctctgcccactctcacatggtggagtgtaatttcactttgaataaatctctgcttttgttgctt

SEQ ID NO: 132 - DNA, 818 bp, Homo sapiens
ggccgcatggagtgagtactgtctctggccaccgagcagagccagtgacagcagcgtcctggtaggcaggcaggcgtatcaggtttcagaggatgcggctgggaacgggagtagaggtatatgagctccctgaaagcacaaagcagttatttccatcttcagatcattcagagattatgaaggcacaaaccctgccttcaatttgcttatagtcaagtggagcagacacaagtcaatgattgcagtatagccactgaagtaatctaaaagaggtgagtgtggcacttaacctctcctgggagggggaggaataaggcagtgtttccaagaggtgattttggagctatacaggcattaggtagacaaggaaggggaggtccattctgggtgcctaggactctgtggctgatttataaatcgtaaatggtacaaaaaacagtgttgagtatcttttacctttctccagagtactgttcttacttttggatagtgcttcttgttttttccttccctctccctgtccctgtcacctttaaattaaatgaatgtttggaaggaagtaggagggtaagaatctttctgggtggcagaataatagatgggtctaccaagagcgatgtatatacccagtaaagccatctctaaaactgtgtttctgcattgttacagtgcatagttgggaaatctcagttttgttggctgtgtactttcccagtgaatggattatattcctttctgcgagccagtctgtttgaatttaagggcatctcttaaattcctttcaagcaagagacctaacatttatacttaggaatgag

SEQ ID NO: 133 - DNA, 289 bp, Homo sapiens
gaggggtagaatttagcgagggagagagactttggctcaattaagtaaaaagttagatgggctcagttttcttgggcaagtctggcctgttgtgcaaagcacccgcactccctgactcttccccaaacacaagagctaaggtgggtgttctgttcctcccacttctgcctccaaatgacctggagggaatttgtgtcccagctgttcccttccctgccacctttgctccaggtgggaggatcacctgagtgagcctgaggaggtcaaggctgcggtgaaccatgatcac

SEQ ID NO: 134 - DNA, 2219 bp, Homo sapiens
agctccgcgaccgcccgtggccacaccagtcggggacttcgtgctttacgatgggggcgcagcggtctggcacgcgcaggaccccgggccttgcaccccaacgctggccgccctggacccgcggcggggacccgcgcagtcagggtacctgcccataccgatggggtggggaccagcacggagactttccttcaccccgcggcttctgttcctttcaggacggacagcgcccacccggaggaaagcctgacagatgagacttcgcaaggaacctgccagttcagggaggcccacctttctagaaggttaacaggaacttccagcctccagcctacttagtgaccagctgctggaggacagtgagtggcccctgctgtccgcatctccacaggggtcaccaagcgcactcacagggtccccctccacctggagcagagaattcggaggagcccgtcttgctgtcttttctgatgttgttaaactatgcttgggcctgtcctttgctgaaaggagctttctacacagctggacttctgaggtgggacctgccacgtgctaactctggcactcggagcggtctctgccactggcaatgtcctgtcctgaacatttccagtgtggcctctctcctgaaaggcctgtgtgcgacttctttgtgaagccggaagaaagttctgggacttccccttctcctttggtgcaaagttacactaactgtcatgatgttgttgatttccttttttttttttttttttttgagagtctcactctgttgcctagactggagtgcaatggcgtgatctcggctcactacagcctccgcctcctgggttcaagtgattctcctgcctcagcctcccaagtagctgggattacaggcgtgagccaccgtgcccggccttgatttccttcttaagcagagctgagtctctgtctctgtccacaccagtgcctcctgggccttcctgagcacgtgtggctggcatcgcttcccatctctgctccctgtggcatcttgctgtgtccccggcacctctgcaaagcacagcctggccaacatggtgaaatcccgtctctactgcaaaaactcaaaaattagccaggcgtgctggcacgcgtctgtagtcccagttactctggaggctgaggcagaagaatcacttgaacctgggaggcggaggttgcagtgagccaagatagtgccactgcactccagcctgggcaacacagtgagactctgtctcaaaaaaaaaaaaaaaaaggtaccggccaggtgcggtggctcacgtctgtaatctcagcacttagggaggccgaggcaggtggatcacttgaggtcaggagttcaagaccagcctggccaacatggtgaaaccccatctgtattaatagtaaatccaaaaattagctggttgtggtgatgcacgcctgtagtcccaactactcgggaggctgaggcgggagaatcacttgaacccaggaggtggaggttgtagtgagacaagattgcgctactgcaatcccacctgggcaacaagaaggaaactctgtctcaaaaaaaaaaaaagaaaagaaaaaagaaaaaacatattgtcctggctgctgaggggcctaaggccacacacgtggcagttagctcagccgtgcacctgtgggagtgacagacctcagcctggaagacattatctgtggatctccagtgcaaaagtggccagtaccaaaatggagtcacttatgtcaaaccctgaaaaatggagccaggaggccacgaaggacgggctctcccaggtgtgccaggaaagaaactacggaatttctcaaaaccacagtactgccgctaagctgcctgcacgaggacgcttgcctgacaagggccgtcttcacctccagatgaatgccaactcctgcaacaagcctgatacagtttggctgtgtccccatccaaatctcatcttgcatttcccacaatccccacgtgttgtgggagggacctggtgggaggtaattgaatcatggggccagttacccccatgctgttctcgtgacagtgagttctcaggacatctggtagttttataaggagcttttcccctttgctcagcaggtttctctcctgcagccaggtgaaggatgtgtttacttccccttctgctgtgattgttaagtttcttgagccacgtggaactgtgggtcaggtaaacctctttcctttataaatt

SEQ ID NO: 135 - DNA, 237 bp, Homo sapiens
gtcattttggggcgcttaggggtgggtgccggggggcgcgctttccctcgtgaaggtcgctccaggagtcatgcgtacattcgttcattttgctctggacgcactgatgttcccggctcgccgccgtgccgcagtcacgaggctctccgaacgcctttcactgtgtttctgtttacattcgcgtctgcaagacccggcggcgcgaccgaggcccgaacagcattattcacaagagcc

SEQ ID NO: 136 - DNA, 400 bp, Homo sapiens
ccatttcccagagaggccagaggcagaggggtgcagaagagagagcagagcccctttgcctgggcacatctgggctcactacatgggaaagggccccaggacaagggaagacgagaagagacaggccaggcccaaggagggagaggacctgagatcgaagataggagagaggaagacaagaaggagaagcagaaatgagaaggttggagaaatccgaagaggcagctagggagagtgggaggtgaatgagcaaacagcacagaaaaagaaacagcagtatatgtggaagaaagcaagaaaaatcaactggcctggaacctaagacttgtccaaagatgtcacagagagtaaaatgagaaaaatccagtagcccgtgcccagagcagttcctcgtacccag

SEQ ID NO: 137 - DNA, 618 bp, Homo sapiens
aaactggtcgccttaaaaccaatttgaaacaggttgttcaggagcaacaatacaaaaacaaagtgtagactggaatgtattacattttggccaaacaaaaagatttgattcattctggctcatgaagttagataatggtgtttatggttttgacagttcactgaaactttttcactgaactggtttctttcggatgcattttcttgagttctacccatgactgccacagtagcagtcctgggatcagaacccacacaccgttaaaaaaaaaacaggtaaagccaacagtacagccagccagttgctggtgttgaggttggggcttctggtgagccactctgggaggaaggtcatccagcagccatacatctcgcacacgcacagggtgatctgcaggaaatgccggtaatatttttccttgactatggcataaatgaggaacaatgccagagacacatctagggcgacggccagaatttccacagacacaatggttggatcaaaataaacccatcttgcatcagctttgccatattctttcccagcgcgtcgtagcagagccagatgagcgccccgcggtccgtcgccccccgcccgcggcccaggcgcaggcccagg

SEQ ID NO: 138 - DNA, 592 bp, Homo sapiens
acacattaatctacttatctggaatcactttgcctctaaaggccagagaaaaatcacagcttccttgtcggaggggaaaaggacaggtgatctggggaaaacgcagctacacctggagcaaggtctcttcccggcttggcaatctcagctgtgccggcgctacgggacccgagccgtcccagaaaccaaagggcaggcacggcagcaaacgcctgaggactgagaagacgtcaaggtccagacactcgtcattaacacctactcacaaccgattcccccacccactttggcctcaccaagatttggcaagcaggagaattaaatgtcactttgctaccatcctctgctgaacctccaacagaaaaacccatattgcccaagtacaaagcatgaaatactgctggcctaccctgacttttcagctattctccttgcatatagtaaatgactccccaggagacatcatcttaaagtctgagacacaaaaaaggacccaaagtcctatatgcttgaagaattgcatggcaatatatttagttaacattttctattttattagaaaaaacagacaattcaattgtcgatgtgatcg

SEQ ID NO: 139 - DNA, 1819 bp, Homo sapiens
atttacaaaatgttcatggcagggcccacttcacagggctgtgaggattacagaggataatctgggtgaggcgcatcagccccagcgccgcctgccacaattctatccggccccacatatgcatcgtccataagcgtccggcccctgcattctcgcttttccacgtggccgaggtgcacaccccaacccactgggccagtctccccgccctcttacctgctcttctttcccgactcgtctttaatacccaccaggagccagtcgccgcgggcctggctctgtggtggcaagttgcatgggttctcccatcaggacctcccgatgagcctacgaggtcggttctattactgtcgccacttcagagggaggaaacaggcccgcagggttggggaacttcccgaggtcactgaactggtgtcaggcccagattggaatccaaacacatcccagcccatgcccggctccccagcgccggctcccaggcgtcttcccgggtgccagcggcacccgcatccattcaaatgctgcccagtccccgctcctcagtcgcttccctctactacgcgcccgcatctccccccgacccctcagggtcaggcctctcggtggcttttcctttttctcttccagaaactaaggggtgagaccgacgtttgtgtgccggacgcgtgcaggtggcggcgacgctcccgggagacgcggggggagaaccagtctgtgcgcgcggctgtgagaagccccgaccaagctttccacgcgcttgtttcgggcagcagaggacgcgagggccgactgcgtccccagtgcgcaggctcggccgggggcgcgtaatcaggcagcccagcggtcccttcaaaccgaggcagggaagctctacgtcttgggggccgcatggtgccgagagcgcagaccagacccgccccgcctctccgtgccacgcacgcgctcggctccgcgcttaatggctggagtgcagtggcgcgatctcggctcatcgcaacctccatctcccgggttcaagcaattctctgcctcagcctcccgagtggctgggattacagaagcagtatctgactgtgttgcccaggctggtcttgaactcctggtctcaaatgattctcctgctttggcctcctaaagtgctgggattacagacatatttattcaatttttaatgtcagaccataagcaacgcgaatgaaatttggtgccatcactcggatcaggggacctcccttgggagatcaatcccctgtcctcctgctctttgctccatgagaaagatccacctacgatctctgctcctcagaccaaccagcccaaggaacatctcaccaattttaaatcggatcttctcagcttagcggctgaagactgatgctgccagatgactttggaagccccctggaccatcacagatgcccagctttggataactcttacagtggaggaagacaggaatatcaggtctctgagcccaagctaagccatcatatcccctgtgacctgcatgtatgcatccagatggcctgaagtaactgaagaatcacaaaagaagtgaaaatggcgcgtgcctgccttaactgatgacattaccttgtgaaattccttctcctggctcatcctggctcaaaagctcccccactgagcaccttgtgacccccactcctgcctaacagagaacaatcccctttgactgtaatttcccactacctacccaaatcctataaaacggccccacccctatctccattcactgactctttttggactcagcccacctgcacccaggtgaaataaacagccttgttgctcacac

SEQ ID NO: 140 - DNA, 533 bp, Homo sapiens
gaggggcacactctttccggtttgcttccggttttttcctcaggcttccggtctgtttggtgccctggtcgcgtgtcttccgaactctgctgcttcgccccggcaagagcacttccttccgcggctgctaaaactggtgcgcgggttcccaacttcgcagaagagcttcatcggccccccgctagagacctcagaccgcagccatcgacgcctcgcctcggggatctgtccccaccctcggggccagctcaccatgagtcaggccctgtgctaggtgctgggatgaagcagtgactgacacaggcctggacctgtccttgggaagagtgcgtctgtgacacagatactgtgccatgtggcaaagtaagcgcgtgggacagcagagccttgtttgccattaaagtaatatcacaagtctgttaaggttggagaatcaagtgaacatgctgaaaagttatggggaatgtagtctcatagctgggggagctgggggccttgtcaattggttcccccagtctggagagcaatctgag

SEQ ID NO: 141 - DNA, 748 bp, Homo sapiens
ctttcgtggcacttttataggcaggagagagagtggtctcacaacggaagggcaccagccactgagaagtcctaaggccgtgtttgagttctggctcatcttttttgctaatttgctcttatgcatatcacccaacctcgctaagccagtttcatcatcagcgagaacagcacactgacatgcagggccagctcaggcgctaccacaagctacacatccgtccattcgtttaatcttcacagcagccctggagaggtggaaacgaaggcaagcaaatgcagtcattttgttggaggactattctacatttccaaagcaatgaagacatgaccccaaactaaactctcctgcaacgtattcttacaagaaaaaggctaaaagccttattgcttaacaaaagctaaacaatgtgaattatttcaataactggtccaaaaagctgcagcaggccactgagtaacttggacatctgttgccatgcttgttcatgctttcccctgagatgacatatatgtatcatcattaataggtgtccttgattttgataagaacaatattcctgtacatccccacatctcctgtacatagccatgtgctgccatcttctgattatgcccagtggagtgtaaacattttttcatgaaaaagcaaaatcaataaaagtaaaactccccacttttcctgccagtagtgcccttggtaacaaacagggcagagacaccaatacagagattacaatactctcaga

SEQ ID NO: 142 - DNA, 1958 bp, Homo sapiens
ctcatcttcacgttttctgcatctattgaagtgcgccactgagatcgtggagttcttccctgtttgtccatatgatgaacaacactgattttctgatgttgaacaatccctggaataaactctgtttggtttccatggatttctgtttccctttagattttgttagtaatttattttggatttttgcatccaagttcataattgtaactggacaaataaaggcagattttaaaaggacaagttgggaggctaaggcggaaggatcacttgagcctgggagattgaagctgcagctagcttcgattgttccactgtactccagcctggtgacagcaggacctgcctctaaaataataatacttaaaaggacgagtttacctacagtctcaccaagcaatgaaagagcttatcttcttcctgtttcctttacggatcttgctcatgtattttatcttagttactttagcataaatgctaaatcaaattctttttcactagacatcataatagctctaggcataccacataatacccaagcacattttaatcattaaaattgtttcctttttttgtggctactgtaaccacttcagcgaaccatttagtgtgtagtgggtttaaattttttctccttcctgggataaatttcccaggagagggataattgggtcaaaagttacgaacatatttatgggttcttttccacaagagatcgatcagtttgcaagtgccatctgcactgtgggggaaccaatcttcaacttgcctgcatttggtattagtatttcattaacctttcattgatctaattacggctctttgacacaattttcatcagtgatggactaagtgtgatccggcctgacccgcctccggccggcgtgagaaggggcatgtgtcgggctaccctcgggcttcccctgccgcccattgtgatccagcccgctaggcgctccctgccgcccattgtgacgcctgccagccgcaggctgggtccccgaggcgggcggcatttaggctcggtctccacagccatggccgcgacgcaggagctgctgctgcagttgcagaaggataaccgagatggtcgccagcggaagcaggagctagagaagctgatgcgcgggctcgaggccgagagcgagagcctgcctcaaccagcgcctgcaggacctgagcgagcgggagcggaggctgctgcggaggcgaagccaggaagcgctgcttctgcaaggggaggtgcgcgaggcggcgcgggagcgcgcgcagcgggtgcgcagaagactggaggaggcggagcgccacaaggaggacttgaagcccggtaaaccccgtccttacgagccccgcccctagctcttctactacggaggggaactgcagagccagaagagcacggagcagcaactcgcagcccaattggtgacgctgcagaatgaactggagctggcggagaccaaatgcgccttgcaggaggagaagctgcagcaggacgcgctgcagacagcggaggcctgggccatattccaggagcagaccgtagtcctgcaggtgtgacgggcagcttcgcagagtgcagtacagcaccgagtcgctcatggaggagatggccagggcggaccgagagacgcggctgttcggcggtcctcgcgcgctggccatcaggcgctgctgacgctgccgctcctcttcctggggctgtcgctgctctggacggtgctgttggaccccggcgccgtctccgcgtggctctggagcctcacctcggagacgacgctgcgccgcctgcgctacacgctgtccccgctgctggagctgcgcgctaacgggctgctgccaacctaagtgcagcgccccgcgcctggctccaggtggactccagggcaccggctttatttctggtgcactcctctcctgagagtgtagaccaaggtcgcctaataaactcctcaagggat

SEQ ID NO: 143 - DNA, 311 bp, Homo sapiens
ctatgtgagcatcccggtgcctgcacagcaaggactctcattgggttccacacgtgctgcgcagatccctgacgcagcgttcactgaacctcaactgcaggagcttcattcctgaggacgctgttaccaagaatgacttgcctcttgaagaatgagtttgcaaagccggcagttagattgctgatgtccaaagacatgaaaatttccaggctgacaaataatttcgctgtcatcggtcaagactccaggatgatattctgagccatatgttaattttgataaccacctagaacaataaaaggtaaacatgc

SEQ ID NO: 144 - DNA, 317 bp, Homo sapiens
tgacagtgcagaaaaagaagggtttcatatgtggagtgtgatgcatgtcaatgggagtttcctccacctggtgactcaggtatccaggcacattcatctctgcgggtctgccatcttgacacgaggtcattgcagaaggagagagggtgtagagtcatgccagttcttaggtgctcctgacaaggagatctgcagcactctgctcacattcctgttttccagaactcagccagtacccagtgcaactgccaaagagtcttggagcctcccttctgctcccagaggcttttcttgctcatgtctccagccacaatatc

SEQ ID NO: 145 - DNA, 1150 bp, Homo sapiens
gacctcccctccccaccgccgcccctgcggtgagatcctgcctgccggggcgcaggggcccgcggttgggctccgggagacggaagaggccccacagctcgggccccacgcagtggacgctgccacttaattttggcgtaattgatgtcaaggcgggtgcccgggcccccagtgaaatgcctcatgaactcgctgcgaggaacggcgctccacgcggtgcacggtggccaatcagagctgccgcttctgatggaggctgagccggctggggaggcgtcttggccaagaaccagccccagcctcgctcagggccccaacccgcagaccatagtctcagctctgaacatcttcccgcacctctgaggagccaggcctggaaaccctctaaaatagatttttctgcctcaagacagaagatgggcgttccaggcagagaagagctgcccagtcacgtgctctgctccacctggtcagagacccttgacctttagaagactggacctgagggcgtggctggtggacctgagggcgtggatggtggacctggccacccagctgtagctttttgggttcctgtggtcccatttcttgggtcaatctcacacctggcagctcccaggaagacacccccaggcccctcacactcctgggggcagctggaattggcttcagggcgggaccaggggccccatgggtgtttggaatccctgatctgggtcaggcaccggcagcaggattccagcctggcctggactctggtgtgtcccgtttgaagaaaccccgccctgtgaaagttcaagtttagcatccaatgacccatttaagaggtttgctgagccacgtcacaggagggtctgggtgcaaacggaggtggcaacacacagagcgagccttgagcacccaggttacccccaggacctccagtctggcttgggggctcctgctgtcctgtggagcagccccctgggatcagggacggggctgagctggagagtgtgcaggattgattaatgatgtctgccacggtcaggccaactgctgtgtttctggggcccacaagctaaaaatggttggaaaaaaatcaaaacattaatatttgtgacatatgagaatgctatgaaagtcaactttgctatccataaataaagtt

SEQ ID NO: 146 - DNA, 1076 bp, Homo sapiens
caacagctgtttttcttaacgctctgtctcccgaaaagccccagtgtgtgttgttccccttcctgcgtccatgtgatcccatttttcagctcccaatacaagtgagaatgtggcgttttgtactcttttcctggattagatttaaagtggactcattccaattacagggcctcgaaagagtcctgtattgttatttttcgtcactacctccccgggtcgggagtgggtaatttgcgcgcctgctgccttccttggatgtggtagccgtttctcaggctccctctccggaatcgaaccctgattccccgtcacccgtggtcaccatggtagtcaccaaagccgccggcgcccgccccccggccggggccggagaggggctgaccgggttggttttgatctgataaatgcacgcatcccccccgcgaagggggtcagcgcccgtcggcatgtattagctctagaattaccacagttatccaagtaggagaggagcgagcgaccaaaggaaccataactgatttaatgagccattcgcagtttcactgtaccggccgtgcgtacttagacatgcatggcttaatctttgagacaagcatatgctactggcaggatcaaccaggtaggtaggtagagcgcggcgaggccccgacgcggccggacggccggccggggggcctcgcgaggacgggcccggcgccccgcaagcgaggaggacgacggacggacggacggacgggccgcggacgggcggacgggagggagcgagcgggcgcgggggcggcggccgggaccggtggggccggggcggggcgcggcgaaccggacgccccaaccacccgccccccacgcgacacgaccaccggggccccgcgccacagacccgcgacgcttcttcgtcgcgcccgcccgcgaggaggcggacggcccgacccgcgcccggcggccgggagggaccggcggccacgcgcgcgcgcgcgcggccggcgcccgcgggcggcggcgaggcggggacggcgctccgcccgccccgcggggcggccccgacgtccgggcggcgagcgagaggcggaccgcgg

SEQ ID NO: 147 - DNA, 461 bp, Homo sapiens
gtttacaatcctttagctagacagaaaagttctccaagtcctcactggacccagaagcgcaaccggcttcacctctcgcagtccaggcgggactttgcggcacctgtcccaggcactcctgcttcccagagggaggtcttcccagccaatcaagaggaagagaggagaagctagtaacagaaggagacccgccatcgtggccaacgacaccgcgaagagggaagggcggtccatgcacgagacccagcgtccaatcaagcccagcaggcgccggccagccgcggtgaatttcagtcagtgcgtcaaattccgtaaaagatgcaattgcagtttaactgggattccacggtgcatttcgatcactttgggagaccgttgacatctttacaatgttaattttctcgttcaagatttctctccatttactcagaaagtttcttttgtgtctgccaataaagttt

SEQ ID NO: 148 - DNA, 1295 bp, Homo sapiens
atcctgttgcctctaagtcagtagaatgaagagctgtgtccagggacacaccacaccgtgctgaaggagactgctgctgtgtccacctcttattcatagacccagtcatgagcacaagacttgtagtcaaccagttcttcaggcttaaaccgtaggctgatttctttttcagcactttttactgaatcactgccatgaatgatgttcctgccaacctgaatgcaaaagtccccacgaatggtgcctggcttagaatctgctggattggtctccccaagcatcactcggcctgtcttcacgacgttcagcccctcccagaccatggccacgaccggccctgagttcatgtacttcaccagcccagggaagaatgggcggtccttcaggtcaatgtagtgctgcttcaggtgttcttcagaggccgggaggaacttcatggccacgaggcggaaccccttctgctcgaagcgcttgatgatcttgcccaccaggccgcactgcatgctgtccggcctgatggtgatgaagacacagcctcactctgtcctccagtctggagtatagtggcacactgcattcttcacctcctgggctcaagtgatcctcctacctcagtctcctgagcagctgggactacaggcgcccaccaccatgcccgactaacttttttcgtatttttttagagatggggtttcaccatgttgcccaggttggtctggaactcctgggctcaagcagtccaccttccctgacctcccaaagtgttgggattacaggcgtgagccactgcacccagccttgtataagtaccttttttttttttttttgagacggagtttcactcttgttgcccaggctagagtgcaatggctcaatctctgctcaacacaacctccccctccgggttcaagtgattctcctgcctcagcctcccgagtagctgggattacaggcgtaagccaccacgcctggctaatttttgtatttttagtagagatggggtttcaccaaattggccaggctggtctcgacctgctgaccttgtgatccgcctgccttggcctcccaaagtgctgggattacagacgtgagccaccgcgccggcctgtataagtatcttataatcatattgtatcccactttttcccacaaatgatacacacgttacctacatcgttcagtgttatgttttcagatcttggaagctgtttcgtttcagtacatttgagcttcctgggatcttttctgtggctacataattttccgttgtagaactgtatgtgatttaattaaac

SEQ ID NO: 149 - DNA, 2093 bp, Homo sapiens
ggactccttcagcgcgctgcctgcctgcccagggccttcccggagagcaggtgacggcggcctccgggcatggagctcgcgctgacgaaaggttctggaagccgccgtaaaaagtaatcaagaaacgggtgacaggacttttcgaacaaggtctcaccatgctgcccaagctggtctgaaaactcttgtcctcaggcagtcctcccacctcggcctcccaaagatctgagattacaggcatgagccaccacacctggccttggttttaattcctgtcacagtatattagttttcgctgttgtgtattgattgattgagacagggtctcgctctgttgcccaggctggagtgcaggggcatgatcccagctcactgcaacctccacctcttggattcaagtgattctcccgtctcagcctcccgagtaacaggaaccacaggtgtgtgccagcacgcctggctaattttttttttttttttcttgaggtggagtttcactgttgttgcccaggttggagtgcagtggcacaatctcagctcactgcaacctctgcctcctgggttcaagtgattctcctgcttcagcctcacgagttgttgggattacaggcgcccgccaccacgcccaggtaatttttgtttagtagagacggggtttcaccatgttggcctggctggtctcgaactcctgacctcaggtgatccacccacctcggcctcccaaagttgtgggattgcaggcgtgagccactgcgcctggcctaatttttcaattttttggtggagatagggtttcaccatgttggccaggctggagttttgcctgttctagaagcttgtatcagtcatacaacacccctttgaggaaccgtttgaggtgtggcacgatacagcaagtcagctgccaaagaggggcttagccacaggaagtgcgtgcccagaacggtaaaggggctgtggcctttcttatcatctccactccctgtcccccccatcacctgctcttcgtgctttgtgataattcagtgagctcatactcatgacctgtgtcctccagcatctcccgtgtccctcacagcagttctatgaggctggctgccctgtttgacaactgaggcccgcatcttccccggaatcaccgacgtgtggctctgagccctgtcccagggattttctccatcagagaagaggagcactttgagctttgagaggagcagccctctgcaagtgaagtggaaaaaaaggaagcaggcgaggaggcccatccagaccctcccccaagacccttgctgaaatggctgggatgcggcgtgcagaagctctcctttccttcacagcccctggctttccaagagtccctgcccacccagatgcccgctggcagatgcagcctcatctcaaggacactgcttgctggataaatccctcaccaccctagagacagcccacggtcctgagacaaggatgcgggccaggcttgttgcacgtaagcgcctcccgcagaaaccagtgaggccggagttccagaggaaatgatgtagggacagaggcagagggcctccaggaggcaccagccccagagtcttccctagaatcagactttaagcacaagcagggagggaaagcacttgagcagtgcccgtccctgcatacctggcctctgctggaacccatgcagggacaggacacttctttatcagcaatcctgttcctctcctgggcagcttcaacctgaacatcctccttcaccttgagctaaaatgggtttcttgtcacccttgcccatcaaacctggccttgccctcaggaaccacacaggacaagcctaatacttccttcttgtggcaacactttagcaattgagacctggctgtcaggtcctccaaataaacatttgtgactgtgatgttgacttgccgcttctggggacctcttctcatttgatcggagaaagtttttcagggttaaacctacttctttcccccaagaaactcttcttgtcaggctcacgcctataatcctggcactttgggaggccaaggcaggaggattgtttgagaccagcctgggcaacgtaggtagactatgttgct

SEQ ID NO: 150 - DNA, 323 bp, Homo sapiens
ttggtttcccagggggcagtgctgagctctttgccagtgggaaatgggatgctggtgatttccagtaggtgacctcacagtgactcaagctaccacttactgttgattgtgacgaaatgccagctgaggcacatgccttgggagctaagtggttgctgcccttgaccactgtgaagactggtgtgggaagggtcgttttggatgcacttgagcaggggtccccaacccctgagccatggagccgcaaggagccacacagcaggaggtgggaacatccagttgcaggaaaacaagcttaacacgcccactgattctacattatg

SEQ ID NO: 151 - DNA, 487 bp, Homo sapiens
gagctgatgttccagtttgagggtggtgctgctggcgacccaggcgggagctgatgttctagttttagggccctgcagctggagacccggggaggagctgacgttcccattcgagggctgtgcaggtggagacctggggaggagctgatgttgttctaatttgagtgtggtgcagctggagatccagggatgagatggccctgcagttcaaatatgagggtcccggagctggactctacgtgaggaaccaatgctgcctctgatgtcttaggttgtggagctggaaactcgtggaggagctggtattggtgtttctagttgagggttgtggtatttccagggtttcacaaaggccagattttatttcagttactgagaagagaaagaaaatgtcttctgaaagaggtgaactcagtcattaccaatagaaaaagtatccactgtatttatctcttatacaaacagaaaaatataacattttccccct

SEQ ID NO: 152 - DNA, 819 bp, Homo sapiens
ctgaggccccgaggggagtgggaagagccggctggacgtcaggcccagccgctggtgcagtggtccgtcccctctgccggggtgggcccctcgggtttcgcgtgtcctcgggaaagagactggcgggtgagccgcgccctcggccttcgctgggctaagccgaccccatgcagacgtcaaacccccctaggtcggcacagcctctctgcggggaggcttagtgcccccttgagaaacggcttggcaacgctgtgcccggggccttgcacgcgggctgagggggctagagacctcgcgacttttactcccccgaccccgatctccgactcctgactttggaagcccccaaagctgcttttcggttgcctacaaagtgtcggtcattgtgccacgtccttggaaccgtgaactcattttctcctcaataacctttaaaaagtagctgtaaaacctccattttacagaccagttggctgaggtttaaatggaggacgctcccagggccccagaggggcgaattccagactcctttgccaggaccttgtactaagccccttccctacgcttttccctgcctaggcctcgtgggctgtgcggctatcctggagacagatgacagctctcccttggatggctttgctggttccgcaccagccagcgcccccatttttcctgcagcaccctgatctgcactccctgaggggctcccactgtccgcggtgtgaggatgtccctggaaattggtcttctgtgactttcttgatgggggcagatgagatctttgtactgcattaagtggatagcgctcaggtcctttgg

SEQ ID NO: 153 - DNA, 788 bp, Homo sapiens
ggattacaggcatgagccactgtgcctggcctagtattggtcattagtattagtaatcattcctaaatgtatatgtaaacatttatttcagtgttaaatattgaagtgtttggtctttatttagaagtttgatgttgtgttttatgaccagaaatatgctgtgaacttaattctttcttatagcagttagcctatgggaaaattggttttgttctacattattttatttaaagtcataatttccaagatcctatcaactccattaagtgaggacttactgtactgtagcctgaggctcatcttagtcttccctcatcccccctgcctttccttcacagtcagcctgcatggtggtctgaggccttcccccctacagcctctcccctttatctttcacggtaatcacccctcattactcgtacttctaactccatcttgaaagctgcttcctggaagatccaaacggacacaaggagggactgaaggattagaatgagggaagtaacccatgcactgcttatttgagatggggaaccgaaggactttggcagttcctacacagagacagatggcagagatgacaaggtttctcagagaatgcgtgaatgggaaaccaaggacacagtcagcatttaacaaaaaggaatctgcatctcagtcagaactgtattgcatttgcttctctctggattaccttgaagttactccccttccctcaataataatggcattatgaaaaaaattggaattgatcaaatgaagtaaagagtaaacagaggaaagactac

SEQ ID NO: 154 - DNA, 575 bp, Homo sapiens
agatggggtcttcttttgttgcccaggctggccacaaattcctgggctcaagtgatcctcccacctcgtccttgtagagatgagatttagttacgtcgtccaggctgatctcaaactcctgggctaaatcgattgtctcacctcagcctctcaagtatgttatgaaggttatatgttaggaagggtcccaggaggtagacccacacagatgggatttgggcataggtttggtttcccagggggcagtgctgagctctttgccagtgggaaatgggatgctggtgatttccagtaggtgacctcacagtgactcaagctaccacttactgttgattgtgacgaaatgccagctgaggcacatgccttgggagctaagtggttgctgcccttgaccactgtgaagactggtgtgggaagggtcgttttggatgcacttgagcaggggtccccaacccctgagccatggagccgcaaggagccacacagcaggaggtgggaacatccagttgcgggaaaacaagcttaacacgcccactgattctacattatgctcctacctcccggcagcctctcca

SEQ ID NO: 155 - DNA, 371 bp, Homo sapiens
ccctgttccttgaattgccctgggagatttcctcagcttgtactggaggatgaagccccacccgcccttcaggatgccagccttggcaacattgtgagaccctgtttctacaaaaagtaaacgtgtagtggtgcacgcctgtagttccagctacttgggaggctgagatgggaagatcacttgagcctgggaggttgaggctgcattgagctgagatcaagccacggcactccagcctgggagacagagcgaaaccccatctcaaaaaaacaaagaaagtggatgcgcgctgctcctgccattggatcatcgcagcatttttcttttctctgatatgcgcctttttcctcatcgtgggggctcatgttttc

SEQ ID NO: 156 - DNA, 624 bp, Homo sapiens
ccgcgccccgggccccgcgcgcatacctggcgaggccacgaggggattctgcgggccgagccccgcctgggctgcgccgccgcaggcgggagaggctgaggattcttttgggaagcccctccgccggctgtaaccccagggccgtgccaccctcctgatcaccgcaagcatggaccccccagcacgctgcggctgttgtccacaccaagggtggcctacagagggaagtgaggaccttgggacttcctccaggacagccctcgctgtccaaatctccacctgctgcagagctgcctccagtcaagcccttgtttccagctttctgtgccctaaataaacttctgctgggattgagccatcagcattctgtggtgggcgtcgctgctgcgaggttgccctcgtgcacacaagctcctcacaggacttccaggatgatatggaagagtgactgagagcagccgcccggtgcttcccaaccttagagggaggtcacgggcagtctccctgcgatgctggccacaggtgtgaggaagacagtccttataggaaaatgccctctcgttcttattctctactttaaaaaatctttaaatcatgagtataataaatgttatcaaatgccat

SEQ ID NO: 157 - DNA, 371 bp, Homo sapiens
agaattgatggtaggaagggtaccaggagatagacccacacagatgggatttgggaataggtttggttatccaaggagcagtgctgagctccttgctaatgggatatgggaggctggtgatttccaggaagtgacctcacaatgactcaagctaccacatactgttcattgtgaaatgccagttgaagcatatgtcctgtgagcttaggggtgctacaagttgaccactgcagcagtaaagatgattctgaagaatggcatgggatggatcctttcgaatgcacttgagcagcggtctccaaccacagggccacagagctggaggtgagcagcagctggatctaccatgaaagacttctgaatccaggaag

SEQ ID NO: 158 - DNA, 425 bp, Homo sapiens
cagtgtgagaccctatctcaaaaaaaaagtgatgtcgggaggctgagaggatgagtgactggggcaggagatgagtactttcccttttaagcccatagcatttaattccctggtggttcacttcttatttggataactaacaaattatttcaaatgtgtgcctataggtgagagaagcaatggtacatgaggagaaatttggagacagacaacttgtcacgcatacagggaaaatgacatttgaagacaaagtcagacatctacaagccaaggaatgccagagattgccagcaaaccaccaaaaactaaggaaagggatggaacatatactttcttgtagccctcagaaggaaccaactatgccaacactttgatctcagacttctggcttccacaactgtaacaataaatttatgtcgtttaag

SEQ ID NO: 159 - DNA, 319 bp, Homo sapiens
ctcctgcctccgccacgcgatgcctcttcatgggtggtggatgaagaaactgaacagggccatgatccttatctgtaatttcccggctaccacactgctttggtggtcttccctcgtctcttcctgggtagaaacaactacctggagatcccaatgttcttgtcagtgcacttttcatggactgcagtggtaagacgatgtgttggatgcccaaacacaaaccaagagccctctaccttcgcaattcccggtgctgtggagctgtcagagttttaacatctcaaccaagccacatggatactatttcctcagaaaagac

SEQ ID NO: 160 - DNA, 342 bp, Homo sapiens
catcgccggcctcgcttggattgttgggtatattttggaagtgtgccagaattggtgaacggaagagtccttatgttgaagtatgctgtatagtaatggccttcagcatcctcttcatacagtagctggggaaaatgccagaatttaattgccatcagatttcattgtgaacaaggacttactgcagaaaataatggaaaggatgtttaactcttttatctccgaacattgaatgagataaatttccagatgctgttctctattttaatgttattggaccaatattctgtataaataattaagatgtaaccatttaatagtctgtaacaatgaacctcagta

SEQ ID NO: 161 - DNA, 1137 bp, Homo sapiens
ggaagcggcggcgggagcttccgggagggcggctcgcaggcaccatgactcctgtgaggatgcagcactccctggcaggtcagacctatgccgtgcccttcatccagccagacctgcggcgagaggaggccgtccagcagatggcggatgccctgcagtacctgcagaaggtctctggagacatcttcagcagctccatcttgtctacaagattttgttagaagccgtcaaaatcctgctgactcgagatgcgctgtggtgcatgttttccccgggcacagcaggctaataatcctgttacaaagagaaatgctgtacatttcgagcagtgctggcccctgggactcaccgtggccttttctaagtgcttacagactctctgtttaataatccattccagaaattttccagggctcattgttgagcttggtgttcgcaactttgagtgatcagcccttctcctttgtgggagcaccaggacagagcagcctttgtccctccccagtctcagttccctcccactgcccctgtggacctcgaatgcagagcttatgcacctaccgaaggtcgtgtcagcacccaaggcagaacgaggctgccctgggaactagggtcaattaagacagcttgtgctggaggaccctttacagcagatgaaggcctctccccagccagaaaagatggagcacacgctgggtggtggccccgcttcctcactggaaggagatggtgctcttcttttttctttctgaattgtggccaccttcataccagtctgtcatggaacacttaagtcgcttgagtgcctgctggtactcccagccctgccatgcctgagccccctgcacacaaggagccaggagtaatcagggcagaccctttagggcacggggacttctggattgtgaaattggctctctgggggccaaggccttctaacgttggtggaagtggctttggcttattgggtcggattctaggccattcattccaacctttagagacatcccagctttccctagcccagagtctgcagcccctccaccatcccacatcctccccctccctttcctcatgaaccccagtcgcgcctctgccttctcaaacccctccaccatcccacaccctcctcctgcc

SEQ ID NO: 162 - DNA, 279 bp, Homo sapiens
agagcatatgcgcatatgtatgtctgagcccgtgcacggaggaggagtatgaacagacaccgcgggacagatggctggagtttagtcccttccttcggggctcttcaccactccttgggcttcccttctcctgtccagccctgtcctgggtgcacagagagggaagtcactccattcctgcccttgaggagctcccagacccagggcaggagcaggatgcagacaagtagacagcaccctggggtccctgcaaggaatgtactatagagccaattttac

SEQ ID NO: 163 - DNA, 441 bp, Homo sapiens
cttggtttcctaagtcttatgactagccaatgcctgaaataatgaactcctccaaggcaagaaatctgttttgaagcttctctgcgttcacacacagcagcctggtttcctggaagggcattttccacattgtgcgttatggatgatcatcccaggcatcaggtgtgaagccctgcatccacatccaggggctatcaaatctctctgcaaaaggagaagctggactcaggcacgtttacagtgatgtgtatgcagggtatgcacagatgtggaaacaggaactgatgtgtccattacaccactaggacagaggccagaacaatgaagaaaccaaatacttggaagagggtagagataatgaatggagtccaagagccctgattgtgccataaatgtccagataattccatacctgaggattatgtggtttgtaaacttggc

SEQ ID NO: 164 - DNA, 220 bp, Homo sapiens
gacacgtccctagtcccatttcacagatgaggaagttgtggctcagaaaaggggcggaaactaaagttcggaaaggtagagcgacttgcccaaggtcgcgggactagaaggtggcggggccaggattcgaaccatcgagctgagccgacgtactggcgaggatcccccaggggcatagagaggagacggagccggttagaaggggcgcgctcggagctcg

SEQ ID NO: 165 - DNA, 282 bp, Homo sapiens
ggtgggaccatccagttgcaggaaaacaagcttaacatgcccactgattctacattatgctcctacctcccggcagcatctccaggcccagaactttctccagtcagcctctacagaccaagctcatgactcacaatggcctatttaggcccataccctacctcacggcagtctccgcagatgagcctactgcctcacaacagcctccacaggcacagctccgtcgttacaatggcctctttagacccagctcctgcctcccagccttctctccaggccctg

SEQ ID NO: 166 - DNA, 376 bp, Homo sapiens
caaagattctcgactgtggttggcaaggcccccagtggccaaggcatgagcctggatgccctgcaaattgagtacgtgttagggatgggggccattctttatagtttgactctggagagctaggaccacctttcccagcctcaggggtgcacatcctcaggagctgcctacctccagatattgtaagtccatgcagaagaggaagggcccagctggggcacctcttggttgaggaatgagtatgtgacattttcatgtgggcacattttgatactactttaaaaatagaccaagcacagtggctcacacctgtaattccagcacttcgggacgctgagagaggtggatcacctgaggtcaggagttcgagatcagc

SEQ ID NO: 167 - DNA, 325 bp, Homo sapiens
ggcgacccggcgagtagaggcaacaccaacactcctccttagcgaggggtctccccgccgcggtggctgcccggccccaaggacaggagggatttgtgcactgactcctgaccccgtcctccagcgctgctctgaagggagagtctgtgcagtggcacctgcgcgaagctggccaaagcctgcccagacggctcacctgtgcgggatggaacaaaaggtcggcttgaggtttgcgagtcccagctcccactgcccctgccacctgcctttcccttctcaggacatacacaggactgggagaaaatagactaagtatttgatatta

SEQ ID NO: 168 - DNA, 443 bp, Homo sapiens
tgtcgcctggagggcacgttcaggcagaagctcctcagtggccacaagtccgctagctccggctacagcccttgccgcacactcgcgtcacctgagcctgtgatgccgaaggacctgttcaaagtattttctgtaactccaactgtaacttggttctaggaggagagaatccatgtttggtcaacagaacttttcgccgccacttaagtttactgcttcaatatcttttccttactaattgattgttaattaagtagtgtccaagtgagttagcctttttagggttgattaattaaaagagcagcaagaatggcattttaactcttctggtttttggggtttttttttcagttactatgataactcttttcaagtccacaaatgatttgttcttagctgtaaagaagaggtcagaaatgtaagtggggagagaacaaagatag

SEQ ID NO: 169 - DNA, 4737 bp, Homo sapiens
cgcggagatccgattagcgcgcggctattcattaggctgggggcgattgaattaggtccctgggcgcggtcgccggctgggggtgtgtggcgccgacccccgggctcttgccgtggcctcgggaggctggagcagcgagcagcggccccagcgagtgtgtcggggaagcgggtgcctccgggtcccggccccgcgggtgcaggcggaggctgcccgcttcccgcgtacaccgaggacggccggcccggctccggagaaatggcgcttgagaaaggaggggaggggaaggttcccggaccctgggcagggacccgtcgccggggacccgcggagccctccggggatggaggaggcgcgagctggaagcggcgcgcgagcccgagcgcggggctaacaccgtggggcccagtctctcctggctcgggtaagtggacgcgccccgaggccccgggtccacgcagggcgcccctcgcagacggcgcatttcctactctcctaaggaaccgagttcccatcactgcctccgatgagcctgtttccggatcaggaacctttttcaagttaatttttaaagcctcatttgaattttttaatataggaaaatacgtatacgagaaaaatcttggatgcaacaaaaagaacaccgtggccacccgtggtgtcccagaagttgctctgagctcctcgcatcagggcaggtgctccacctctaaccgccctgtgggggaacgggaggccccaagcccctgggagtcctggtctcctctagagtgtgttggaaggacagccgctggaaaggcccctcagagcccctaaaccagcctcccctcccccgtgggcagattgttcgagggtcctggagcctgaatgatgggccctcggcttgcccacccccatccccagtcatcaatcaccatttgagaaatgcccactgccagggacatgggagggcagagggtagctcgcgggtgcgtggcccctatctcctcaagctggtttagacccttctggctcagcctcaccagattcctaggatgagcactggcttcaaatcccccaagtgctggtcccttcgtgtccccgaaagaggctgctcgcgtgggcaaaggccccgaggcgtcgagtgcgccttccagggcagtgcggaagctccctgccctcctccttcctccccacttctgcctcctcctcccccagtgttcacttgaagcaaattctagtgggctttttttttttcaatactgtttcaaaacagttgttacagcaaataactgcagacgggtctgctggacgcggtggagaggggctggcagctgcccagcacaggcgcctggccgctgggcagctcccgcaataccaaaataagctcccgagttcccctggaagacttgggccgccgggagctcaggctggcgatctgctcagaggaaacctccctactttccttttttactcttcctgctgtccagagctaacaaatgtttttaatttcagaggaacatggtgtggggatctgcagacttgccttccactggggagagggccagcgaggggacagagggggaggaaaggagaggggataatagacccgaggtcagtgttgatgctggagggcccaggtctctgaagttcctgcagctttgcaggtgagcgggctgcaagtgaggctaggcctgtggacacccagtggggcctggaacagtgccaggagtggccttgaaccccaccttgatccctctccagcaggatctggagtcacttccatgggcctggcatacaccactccagatttgccctctggcctggggagcagataaccccccgccccacataaccagctgcgctcctacacctagcaggccggctcacatcaccctttaacgcacactatattcacacacacacttgtgcacagtcttgaatgtgtgcccacacatctgcctgcacacactcatgtgcccacatgtgaatcacttggaagtgtacacaaaaccaaacccacagcacagatgggcagacaggtgagcctcgtgcagcatgtgacactcccacatgcacaagacatgtgtgcagaggcatatcacacacgcagaagcactcccgagaactgccttctccctttcagcctaggggcccctgttcccccacaaccgggcccagccctggagccccctccagcactcctctcccacccccacgctccccaagagcagcagatgtaggtctcccggctcccaaacctctgagatgctgctctgtctgaaatcatcatataaataatcattttttaatacaagggggtgggggtgtcaggcaagttccatgaaattgtgaattagccgctgctccaaataaatgcctgcttcggcccgagagcagccgcgctgcgcccgctgcgcccccaataatcgtgtgttgggtatctctccattgttccctgggccattagtcaaagggcaaattagaaacaatttcttgacgacaaaaattgactcttaattcttcccaccagaggcgcagggggacaagtccagaggccaggcctgaggctggggctggcggcaggaggggtaggcggggtagaggtggggtagaggtgggggatctaagatggttcacagcacagagacctccctcaactggagggcagcagcagctcacccccaccccagaatcagtgttccagaggacagctgggggcagggggttaggaacaatcccactccctcctggaagaggtcctgaccccccaccccacccatctgcctgtacgggtccctctgctatcgactggggcgagttcttttcatgagggccttgcctggtgcctggagggaacagggtgtgggggaaaggtctgtgtgttcccccctcacctcccctgctcagcggtgtggcctctggctctggggaggatcgggaagccccagggtccgtgccttggagtggggggacagccttttctctgccacagcttctgcctttggaggcttacccttcctaggagcagaactgttgtggaggggaagaggacggcgaaggttccgaagggaagggggctgcccccactgaaaacgaagcttccagtcacagccccttcattatttatcaggacccaggggatgaggtggcaggggagggggctgcatggagggagtgccctcaccctcgtccccagcgcctgccccctcccgaccaggcctgggctgaggcccagggtaagggggctgaggcaggccacagaggagcaagacttgtcaggggccagacctgggtaggaggattgtcctccaggcacacacggcccccagccccccagcctgtcgaactgggctctcccagaaggtccccggctccagcccaagcagggagccaggttgggggtgtgggaaggcagaagtcccagggatcctgggggaggctcaggttgtacctgaaggccacagtctcctcgacagacctcggacgaggttgtaagtgttttaaagaaactagagcagcagagaagagagactcagaagcccgtggcacggctttctcggcgtcccctccagcgagggggtctccattgctgcagttgccggttttgtccaaccaggaggttgacccgaaacagccctccgtcttcctgcccatgaggatgaggacaggaagccagacccgggagagaaagcccagatcagacagatgggggttgggagggcctagtggctgaaactgccctgcttggggacaatgctcaggcaggaccaatccaaacgagggcactgcttatgtggtccttccggagcatcctccaaggcagagcctggcttcgggccctccctgcaaggacacctgcctccactccctgccagaccaggcctggctgcagaggcggaggggcggcagggctgcctgtctccactgtttggcggtgtttacacgtgtcgctgtcagggtgtctggacagtgggggtcgggggcctcccgggcccagacttccccaggcctattctcacactggtgagagggccctaggggaagggtgtgggctgggtggcggggccaggccagctgagacctacaggaccgtggagcatttaggtctcccacccaactccacccggtcctctgagcatcagttacagagcccaggcagcaggagggcagggcccagccccttatcacccatcctcaaggcaggcaggaaccctgaaggcagcttccaccaggggttcccttagcccccaccctccaaaagccccagaccctgccaggcctcaccctgccagcatcgtggccccagctgacggctcccaagggcaggtgctggcaacacaagcaggagccctcggggcatcccgcagggcacacaccaggtcgccctgggctccccaagcacctcccagacccagcccttgggtgggtcctggcccacaaacccccacgccctgcccctgagatgagccccaccgcccacctgccctccagccctggagacctttctcccccttggccatggctcccatggggaggctgcaggccctccctgggctggaccagaggggacagactgtctctcccctgcgacttctgggggcactggagtccttggcctggttaccttcagcatttatagccctccagtgagttattcctcggagttctcacagagcagcatgcgcctgcggcaaagccctcacctccagcccctggaccacctgactgctgcctcccgcctggcgccaaacacgg

SEQ ID NO: 170 - DNA, 885 bp, Homo sapiens
gccaatcgcttgaggtcaggagttcaagaccagcctggccaacatggtcaaaccccatctctaccacaaatacaaaaattagcagggcatagtagcacatgcctgtagtcccagctactcgtgaggcggaggcaggagaattgcttgaacctgggaggtggagggtgctgtgagctgagattgttccactgcactccagcctgggtgacagagtgagactccatcagaaaaaaaaaagaaaaatttattttggctcatggttctgcaggctgtacaggaagtgcttttttaactcctcaagctgcaacattaaatgcagagtccctacttagtgggcccaagtcaataaattcagcctgatctaaggaaggagaccacctctcttattgtctcatacctcagaaaaagaatgaggaaaaataagttaaagaaggcaaaaatgagataaatagtcaggcagcctggccccgcaccccaggcctggtctgctaattaaatatcaacccctgactaactgcttgtactatctatagattccagacattgtatgaggaagcattgtgaaactttctgttctgttctgtcttaactaccaatgcatggggccccagccatgtaccccatgcttgctcaattgatcacaaccctttcacgtggacccccttagaactgtaagcccttaaaaggggcaggaatttccctcttggggagctcagtttttgagatgcaggtctgctgacgttcctggccaaataaagctacctcttccctcaacccagtgtctgaggggttttggccatggcttatcctgctacagatccaactctgtgttccttccaccattatcccataaccttaatatccattcccatgcctgttctccag

SEQ ID NO: 171 - DNA, 276 bp, Homo sapiens
actggttagtcatgaaatcggcaaaattccagatgagctctccaaccacgtattttctgagtttttgatccagacccagatggtactgctctagcagacttttctggtagtcttcactgaacatcagaggtggctgccccttgggagtccactgtgactgcagtccagtggggtcaatgtccacactgatgccggaaagaagtcctgggagatgcggagggcatcctgtagcggcaggcagtctgggtggtccacgggtgtgagcttcagcaggtc

SEQ ID NO: 172 - DNA, 291 bp, Homo sapiens
cacagatgggatttgggaataggtttggttatccaaggagcagtgctgagctccttgctaatgggatatgggatgctggtgatttccaggaagtgacctcacaatgactcaagctaccacatactgttgattgtgaaatgccagttgaagcatatgtcctgcgagcttaggggtgctacaagttgaccactgcagcagtaaagatgactctgaagaatggcatgggatggatcctttcgaatgcacttgagcagcagtctccaaccacagggccacagagctggagatgga

SEQ ID NO: 173 - DNA, 1390 bp, Homo sapiens
ccgcgggccctcggtgcagcaaatcggaaagtgctgcggtcggcggccctgggctctgagcgctcaagcgagcagaggggtggaggggctctccccacccacaggaggctctcggcggggcgcagccaattctgcgcgcccaaggctcccctctgccgtggatcgcgtgtgccgagtgttggcctcttccccgaaagggccagacggaccaagggggccttcccagccggctgcaagctctcagacgctaaaatgggaacaaagcttccagaaaggcagcgcctttgggcggccgcgccccgcccagccgcgggggccattgatacagaggcttgctgcgcttggtgtgcgcggcccggccgggcctctggaaacgcccatgagaaatgagctcatgctggatgcgcgcgctccttgggcgcaactgcccagcgcaaaacgggccccgaaagcaggtgaggggaaatgccgtcaggccggatatcctgaagcctccgaggaaatgggggggtcagaggagcccgtggtagctttggatcttttggaactagggtgatctataaaagtgcagcttgagaagatttcatacataagaccagcgtccattgttctaccatagaaccagttcctttggtctgctttagaacagtgaggtatggctacgtcaagataacagagaaagtagaacagacagttgccatcctgattgtaatccagtggtgcctgtaatttctacctgcagagtcatctctttctgttaagatgctgtctccagaaagcacatgttaaaggacctatatttgatcagattacctggctcttgctttgaaacactgatgaaggacttgggacagaacaaagtgagtggaggacacttcaatctaaagtgatcttaaaggaggagtagtaggatttgaagatgaagaaagaagaggggaggttaaaaaatggaggcaacagctgggtacagtggctcactcctgtaattccagcactttaggaggccaaggtaggcagatcacttgagaaaaagagttcgagaccagcctgggcaacatagtgagaccctctctctcaaaaaaaatagccaagtgtgatgatggacacctgtaaccccaactacttcagagactgaggcaggaggatcacttgagcctaggaggtcaaggctgcagtgagctgtgattgggccactgcactccagcctgggtgacacagagagacctctctaaaaaataaaaaaataaaaaaaatggaagcacagaaaactataccttttctagctcaactttaccacattgatgaaaaagtattgagcagccacaggtacatgacattccactatgttcttgggataatattaaagaaaaggcatgaaggtatgctctga

SEQ ID NO: 174 - DNA, 516 bp, Homo sapiens
gctcagatttatccagagcaacctactgcctccacaatagctaaatcgatagagattctgactaaagatatggacttcctcctccagaaacatgcgcagaagtgcatacaccatttacttcgtttcactgcactggaagatgatttactgaacataagcaatatttgtaaaggattatgcctccgttctcttttgaaagaaaaatgactgtttcctggaaaaaaaatttagaaaattctgactgttcagtagtacatctcaatgagatctagtttaaatgagttgaaactgtgctttggcttttgacatagcaacatatacttcatctttgataacccattacaactttttccctatggcaacaagtgctgaaatccttgactcacaaagttctcaaaatgtggttctgagaccaccacctttaaaaatgcaccatattatgtatttttacaagcaccagaaagagctgtggtaatttttcctgttttcctgaatcttctttgcaactcttaaaag

SEQ ID NO: 175 - DNA, 733 bp, Homo sapiens
gctggcgcaggctatgggctgggcggcggttgagacagcggcggtatcgggaggggtaggtgagggtcgcgaggctgcgtgagcatctgagtgaacgcggtgcttttgggaacgcgggacgggcgacctgtggcgccaggagcgggccgaggcgtggcgcacggatgccgtctggatgggaagttacggtttacagcgaagtccacccagcgtttccgaggctggtgatgggcaagccgggtgtaccaagtccaggatgcacatgaggagcgtttgtagcagtcactgaatcacctcatgactagcggggcaggcctctaattcaccgcaggatttccggtaggttggattgtggggttggtgtttgcactccaaagagttgctgtgatttccctgtatctgtctttctggcttgttagatcttctcatttggcgtcctttctccgaagagttaaccaagacgtttggcatggtttccttgctttcctcctatcttttgctgctagagctgctttcgaaaagaagtcttttcttgcagtggtatcttttctttgggttacagtgttgttcatcctttctttgccgaaagaatgaatcccagtgcttcacaaggttaaaggaaagatctgctggtagtgtttagtctttgttctgagctgatatgtgttagtagctttttgtttttaaattttattagtaaaatttcaccagtgaaccagaagctctttttttc

SEQ ID NO: 176 - DNA, 1290 bp, Homo sapiens
aacatgacaaatttatttgaaagtgggcattgcaatgtagaatatggtgtcatagtaaactataggtgtattcagggaggtaaaggaagataaggggtttaaaaggaaaaacgaggaggattacgtaagttgttttgaaacaattatccttggctacaaagatcagtaacaaaggggatggccagtccaaggttggacaggcagttgctgcgcaaatgtccttgaagcatttttttgtgtagttttgtggcctttgtgcaaggttgtggttttggcagtcttttgtgctaattctttatatcaggcaattattagtgagaactttcccatcacggctttccctgactccattctctgacagctttcacaatctagagacagaatcccggagggagaggagtaccaaatagcttaagagtttttttttgtttttgttttttttcttaaaaaaaaaaccgctaaactctaccctgatcagtgaaaagaatttagctgaaagatgcagtttcttcttggcagattcagacaagaagtgcggcggaagcttacacctgcacgtggtgggacagaggcaagaacggatggtctggctgaggctgagagaaccaagctggattaggatcggcttgagggcccggcgtcgtcagtggtgacctctctgacctgaggcaagcaactataatgaatggaaaggaaaccggattgtactttaaatccgagaacattctctactctccagaacaagtcatctgcaggcgcaggcagtggaatccgtgaggccagctgtacggcgggccgccccggacccaggcttggctcctcactttccgctgtttttagtgcggtcctacaagtgccctggtgcagcccgagatcagtaataaatgcagctgaaatacaccggctcccacgttctcgcgggggtacctgccaggccggcgtccacgctcctccccggctcccggccgaccgcgttctcggcggaggcatcaaccacgcgggcacgcaaagccacgagggccgaatctcagcgacttcttcccgctgtgcctcccgcacgctccggggcgggcgccgacagcccccgggtgcagctgcggatgctcggggaagcgtggcctgggcaggtggctccgctgctctctcggagcgccaccagcgagaggggcgacccgagaacaaaggcgggagaggagcggcgaccgcgagcgcgtagaggcggaggccgcgcagtctccgcgcgactgctccgggcagggcgacccccggcagagagggggcggggcgggg

SEQ ID NO: 177 - DNA, 793 bp, Homo sapiens
ccggactcgagattgacggcccaggccccgccctgccgccccaccggcccgcccgggccctagtgggtgggcgcagcctctggcgcttcttcgggatcccagctgaccagctgggggtggggcgtggcggagtggccacgtgggccgcgcggagaacgcgccaggctcatcacctggatcatcgtgcctcagtttccccctcggcaaatggggcttcagcggctcgcgacgcacattgatggagcgtatgtccaggcgccggtgcaccgcaaggagcaaaacagacacagttcttggtcctagggctcacgtcccggggcgaagaggatcctccataaacgatcagccatagcagctgtgattggacaagagactgatttcagtgactttctcctaataagagaccaccgaccagctgaccatgccgaccagctgacccgttaatagagagagatgatgcacctgcatgcctttgtgtcctgaaaagacgttttgccataaaggccctaattgtaagatgtgtaaatgttaagtctccaccccaaagtgaacatgggtcatatattacatgctttgctcaataagagggcatgtgtcaggaccaccttcatgaatattcatagctcctcctgttacctgttgaatatgtatgtttagccaatcccttcagcatagcgctcctgccccaacccctcctccttggacgtgcctgtctctggccttggctggagacagattcccagcctcagacagatggccgccaccttgcaggctacgaccgtttacaagaaat

SEQ ID NO: 178 - DNA, 634 bp, Homo sapiens
gacctgggcaaccccagcctggaggtgccggggccggagctcccagagggctgggtgcgaggcctaggcggggtcaggttcgggttcctaggccatagcggagctgcagcccaggcggccggagcggaacccagccccgctccgagtgccacgtctccaggaaccccctccttactcttggacaacactccgcccccgcccgggcctccgtcccccaaaccgccctcatttgtgcagcgccagatccttcggacacatccctaggtgtctccatcctcattcggtccatccaactcccagacctcacgtcaaccggctgcaccccactttccagcctgcgccccagatctgcagccttcgcccctagatacacccgcctggtgatgaggcgctcctcgcgttccttccgtctccagtgcaccggctttccctcgtcctctgcgcagtccatctcagctcatctctccaattcaatgccatcatctctcctcaccatctctcggtgccctggaatgtttgctgtcagatgtcccctgtgaaacccacaaacgcttgcgatttggcctccttgttttattttgtgtagtcctacaacgtcttgttactaccccctattacaacacttataactcag

SEQ ID NO: 179 - DNA, 378 bp, Homo sapiens
tgaaaatattggctatttccttctgacccccatggtttcttttaaaaaatttgctgttgtttgaattatttttctctacaggtaagtattgactgctgcctcatgaaggctggtcctgtctctatagtgaatattgtgcacctcagggtagaatggagagcagaagacttcaaatcaggcagtctgggttcagaccccaattctagtgctaaatagctacgtgactttaggccgattgtgtgtgacttccctgagccccagtctctttgcctgcaaaatgagaaaaattataacaatgtcatcggttgttctgaggattctgagaggaattagtaggagagagaactaagaagctgcgggcctctacagagccattca

SEQ ID NO: 180 - DNA, 4887 bp, Homo sapiens
cccgcggtctcccccgtccgctgcccggtctcctggggccgcccctgcctcctgcccggtccctgtcctgtgcgtcgggcccttcccaaggtgcagagggcgccactgcagacccgaggtcgcggccaccggctcctgggccaggccctgtttctcgcctcgagccgtcgggggagggtctccagggtgcttgtttggggaaagcggaaacagactgtctgggccgctgttaaaatgtcagcagccaaggaagaagcagcgacctggcgtctgctcgggccaggtgacctttatggcggcgccttctgtccctggtcgcttttccactgaatgaatgaccgaaactgtagtaactcatggccagggaatggcttagttatctgagggaatcttgtcttgtctgtgaaaaagggaaactggtgcaaatgggaattcagacaggtcaggaggggaaggaagggaaggattgaggtgggaaaagagagagaaagatgattggcctcttaggggaagaacacacttggacgtggctcctggggcacttccttgattccgctgtactcgtcagcgggaccggagaggcggaggttccaggagggagccttccagagtcggtgcagggttgacaggagacgtttgttttgcttttcctgaactttcgatcgccagcttgtttggtcttcttgatgttatagggttgatagagaggagtggagtgatatcggacacccagcttcggcaagctctctccaagggtgagtgggccagtgggacctgggtctccggaccaagaagccgcgagcctgccctgctcacagtggataactttctttctgaagttgattttccaaggacaaaggaatcattagggcaaattattattactgcttcatggtggagatgcttctggtttattctgtggctaccgctgttactgcttggagtgcctcaccgagccagctaacaacggcgtgcgtgagcacagggaaaggcttcttgagaaatgaaaactaggttgtaggtttaggaggggaataggaaggttagctctgtccagccgaaagccttttggtaagttgggggtccttgaatttcctgggtgactgcatcttggtgacttctctgaatagaccttcgagggcactggggggtgattgttggagggcttggggagctcaggcagcacttgtgtgggaacgtggctgttacaggaactgcagaaactgggactgggttcctggggaaaggattgggggtgttggaggcgctggcaggggagttatggggaggcgttcttatcagtgtgcgaatattgggcgttcaggcagcgggaaatccgggtccttgcgtgttgtgagctccctggagttacgttcttgccagtttcagctcaattgatccccctcccctgagctatcattggatacattttacttcattgaacacctgactgctgctttttctgtaatccctcaggggcagtcatcttttctgattctgtgtgtagtttgcctttccagatccgtgccatttaagctagaaaaggggtcagttttgagatgttgtgaaaatgttgaaaggctcctcgttattagtgggaagtatctgatgttgccagagactgaactggggcgcggggagcactacggctgctagacactgcctcactgcgctgtgggtgggggaggtgctggattcagtcttactgcctaatgatttgtgaggatttgtgttttcagagtaacatgtttaccttatgttatcagttcctaatatgtgacgtatgggccacagatgctggtgtattatttcacatgcatttatatagattgttttcagggaattcagaaattctgttatctctacactagtgattgtgctttcttgatttttctcttttcattattcttaaatcctcccttttttaatttgcatctcagttcgtttatactcgggaagtgcaagacatggctactagaaagagatgtcaagagaaccggaatccagtaggctacaatttggcaaatcttagcttaaaacttcctaaatgttgaccacagtggatgcaaatggctctgtgcatcgtctgttcaatatggtcaggtgaccacccaggttcacgtggtttgtcaccagggtgacacgagccacacggagtgccctcctcagaggccatgtctcagagacgtttattttgagtggttttccagcgagtgatgcaagatttatgatccattttaacagctgctttttatgcatttgctcaaatttttagattttaagtttagttttaggttttctgttaaacttgctcaactaggagtggtggtcaaatactggacctcattagcatggtagcctgccctccttggcaggctccactggagtgccttggggcctgcctggattccagtcctggctctaccagttttgtgtcctcgccgttactgggagggagtattgaggaaatgcatgcgaggtgcttccgtgattcctggcacagagcaagtgctcagtaattgtcagctgtgagtattagtagtagctaatacactactactattcttggctaacaagccagctcaaagctttgatagttttccattacctgatgatggtgatgatggtttccacttcctgaacactcacacccctgggctaggcacttaacccaaatccaaggtcagcgttattgtttgggggtgggggagacacctcctgctctgactcgtgtgtttgggttcccgtattttcaccagagggtgttagttctgcccaagttcagctggtcctcaaagtgtatatagctctttaaccatcagcaagtgtcagtcagaacataatcttgatttcagctgctactaaatatctaccaggagcctgcttgagagagagaattgcctgacaggtgctgagtccaccattcctgagacactttgaaatcagtgtctgacttaacccaagctgtgtatggggaccctctcaccgtggtcccaatggagtcgcttttgttaggcgcccccctttaccttgggctctgagcttcctctgcctttcatctctgcaggatgaagccccacccgctgtacaggatgcaaagccctcctctataaagtgcgtgcggggccagatgcagtggctcacgtctgacctcccaacactttgggaggccgaggcaggggcatcgtttgagaccagcctggacaacattgtgagaccctgttccttgaattgccctgggagatttcctcagcttgtactggaggtgtgtggccccatgaagcccatagtcaccgttcaccctgagagacgctggctttggggctcacatgcctgctgcggggcagccccaggagatggccaccctgtttctcctggagctggagctgcgcgtgttctcagcaactgtggtggctgtcctgttttgtttgcatcttataaacctttacctgattacattttcctcttcaatttagctgctagaaaacttaaagtcagattggtggctcaccagtaatgagagtttagagtagaggtaaactttatgacatagtcttagactcttcactttctcctcagccaacatgattcacatttactttattttgctgtactgtgagtgtctttgtgtttcctgaattccttctggaataaggcaggttgttagtaagcacaggtttctggtccatctcatagcctcaggcagtgggcggtgctgtccgtgctccctttctgggttacctgtggtagctctgaagttgcagggctgcgatttgaagcctgatttagtacaccgtgtttctgttgtgttctgtggtggtttgctcctcacatgtgagcattcaccctgtggccctgtgtttttccaccacacctctgcctggtggcatcctactggatgtctcagccgagccactctgttctgaagacgcccttgtcctccacccctttgctttgggctctgagcttcttctgcctttcatctctgtaggatgaagccccacccgcccttcaggatgccagccttggcaacattgtgagaccctgtttctacaaaaagtaaacgtgtagtggtgcacgcctgtagttctagctacttgggaggctgagatgggaagatcacttcagcctgggaggttgaggctgcattgagctgagatcaagccacggcactccagcctgggagacagagcgaaaccccatctcaaaaaaacaaagaaagtggatgcacgctgctcctgccattggatcatcgcagcatttttcttttctctgatatgcgcctttttcctcatcgtgggggctcatgtttttgtactttcctctcgctactagattgtgagctgcgtgaaggaaggttcatagttgtgttgtatgtacaggcacacaaaatttgtccttggatagacacatatcaatccgcttccttctcctctctgaagttctttatttaaaaaaaaaaattagagatggagtctcactgtcttgcccaggctggtctcaaactcctaggctcaagcgatcctcccgcctctactaatatgaattattagcctatactaatatgaattcctatactaatatgattgaaattagtttgacttgtataataattgttctcccagattggccttctgttttgatagtagaactaaattattaggctatttcaagaaattaatatattactggtagaaaaactgaagctacaaaatggcctggtttctcacttcagttaaatttgtgcttctgagtgcttgtattgtaggtgaaaccgcactgagaaggtatttgtggcccgtatgctgattgattgatgagacttctttgcacaggagagctgctaaaaattactgcggtgaacagacggaggcccattgaggcttc

SEQ ID NO: 181 - DNA, 1627 bp, Homo sapiens
atattcactgagtgcatagtgtgtgcgccaggccctgttctgggagatgacaggcaaggccactgacttcgtggagctcgccccctaacggtgaagacaaacagtgactgactaaggaaaaaaaaaaaagaaccctgacgcttggcatggtccatggccccctccacacagccagttggccagggagccgaggcagcctgtaaacgctctgcctggagctgctcgtaaacaaaaacagagtgatccacaaaagggccccagagtctggcactgaatggaatcctaccttcggtccagcaactggagaacgaaagtccacatcctgatgactggttctgcacctggggcttagagcacatagcaaggggctgagaagcagccaccacataatcagtgactgcaatttcatcacacagtcctccatgccaggccctgtggggaaaccaagatatgtaaggcaagccctgctcttcggaatttctaatctcagtactgaaaagttaataacataaggacgcagcctatctgtggtaacaccatggcatgagctgtgtggattccaagtgctgaatgaagctggaagggcagaggtcacatcgggccagtatgtgcttcttggaagaggtggcatttgagtcacttgaagaatgagcaggagatgagggatgggaaggagaaggcattcctgggatgccatgagcaaagtgtcacagttttgcattgatcactgtcatccatgtaagagcaaggacagctcaggcaggtggtggccatagaatggaggtggacacataaatatgtggagaaagaaggaagtctttgggttaaaaggccaagacttgacacctgtgaggacctggaatctaaccctgtgtttgtctgtaaacccaaggcaagtcacccttcttccgaggcacagtttcttcacctgtaaaatgaagggactgggcaagacggtttctaaagttcctagggccaggtgcagtggctcacgcctatcttcacaatactttgggaggctgatgcagaaggatcactggagctccctcaagaccagcctggggaacacaggaagaaccttgtctctacaaaaaattaaaaatattagctggacatggtggcaggacctgtggttccagctactcaggaggctgagtggggaggatattttgaacctgggaggtcgaggctgcagtgagctgtgatcacaccactgcacttcagcctgggcaataaataaataaacaagtaacaaagttccttactactttagaatcagggtagaaaggagtgaagatgactttaggattttgaagaacaggcccagcagcaggaggtgaggagtctggagaacagcagatctggggagaggccttcagctttagataaaatgcgtggaccccttcacgactcttccttctgctggggtcctccagcgctgccacaggctgacccgttctcagacttgcatgggacgtgtgttgcctccctacgtctctccctgagatgtgagcctggctacatcaaggccagagcaatgagaggcagtggcccttgccccagcttttccccaatgaggaagcaccatcatcaccaacaccatcttgccacgatagcactggagagc

SEQ ID NO: 182 - DNA, 836 bp, Homo sapiens
gaaggtcgagatggaccatgttgggccccttctctccccgcccccaggccgcagttcgggggccacgccccggcgtgctcgggtcaccgcgggaagcccttgaaccccctggcgcccggcacccacgtgcggtaaccgcggctcctcgagagctccagggatgcggatctacagtaagggctgtggccagatgaatgaatgcacattttttagtgggcagaaagatgttagaattcatgaattagaataagcacaaaggagggcgagaggggaggccgtggaagccgcattcctccccttgccttgggcgcccacccccgaaggggcgcgtcccctccctgctccactgcacgtgggtgtttaaccaggggatatccagtgcctcaagcaccacgacccgggagaaaactgagttgagaagggtccattcaagaattgtgcccacaatataccaggcacttgtccagacctgcatcgtccaatgcccacctcgacctcccaaagtgttgggattagaggcgtgagccaccgcgccctgcctgcatgtggctattgagatgtgctgtatgatacacaccggactttgaagactcagtgtgaaaaataaaaagaattttaagaggggtgggggtcgaggggaggcagagcagtaggacaaatagctaatgcacgcagggcttaaaacctagacaacaggttgatgggtgcagcaaaccaccatgacacatgtttatctatatagcacctacatgttctgcacttgtatcctggaacttaaaattagaaaaaaaaaataataaaagccaacatggcattcattactgccaaaaaaatta

SEQ ID NO: 183 - DNA, 657 bp, Homo sapiens
cgcgctggaagcctcgtctttgtaacatcgaggtatcctgtaactagatgggtcctggcctgcggaggtagtttcccctgtgaagccagggactcagccaggagcgtgaggggacccggatcctgagtctccaagccgcccactaccctctgctttaccggatggaactcatcagtaactaggtctgaggcacagtcagtgaatacctgtttaatgaatgcatgcataaatgaatgaatggatgatccagctcttcctggagcaggcacgacttccacagaaacagagcaaacgctagccgtaagcagaatgtcctgcactgccagaatcgcccagcttcccggcacacctatcaaccagtcgttcccagcactgcccagtatgcagcctccaggcagagggcctggatgtcttggcaggtgtttccgaaaaatccaatccaccctccaaggtggaaagtgtgccatctctgcccataatccaaatggcgtgcctgaggcatagaaagcagctttcagggaggccttccttcctctgagcaatggtggcatcatcagaaaagtggagctcctccaaaaggatctgctggaagcagaggacgcccatgtcgcctggtgactccctctgacccaacaagttgcagcacctctgctgggc

SEQ ID NO: 184 - DNA, 783 bp, Homo sapiens
ctcgccgccccgcccgtcccaggccgggaagctgggacttgagctggtctgcattcgggcaaggtgcctggcacggttgctgtccagggcttagaggacagaggaagagcccctgagtctgtgcacactctgccaccatggccctgcccacctctggagcccacaggtgcccagcccaggccccttgcttttggctagactcctgccctacggggacccccatgatggccactcaggagatgggcccaggaggacaggggagtgactccaggccatgaccggaaggggcctgtggcccctgttcccagtccccagggagacgggagggtcacacgctgttatgaggaagaggacaccgggctggccctggcccagggtggccagctctggtttcactacttggccccaagcccctgaggcaggtgcaggagccaggcacggtgagcagggcccagtgcccctcaggctctggggaaggggtacagccaggtggcccagagcaaggaggtgctgtagacaggtgtgaccacttccagtctctcccggcctgctggccttcatcctctcccagattccaagggccaccgctgggagcatggggtggacatcgtcccaccagcctcctggatccacatccgtaaagactccaaagtgaagtgaggctggcttcactccagctcacagcagaggagggggcagcctcagggcccagcaacttgctcagagcgcacaggagtgcgctggggccgggccagcctggcccagggcctctgactctgcccc

SEQ ID NO: 185 - DNA, 2110 bp, Homo sapiens
caagaggcccctgtttccgaaacccctctgtccccaaagctgcgacagcagaagacacttaggcggcctgaggggttggtgaaccacagaggagctcagcttcgcctggtctccagctcccggtggcggtggcgtgtccttaatgctgctggctttgaactggactgagaactatttaccacacaaacaccaccatttcaatcccggagaatgcctgttttccctagggtgacctggccggggtaacaaacacttgttctctaattccacggtcagccttgacttaattgaggtacttgatttccaacttcctgtcttgctgccacagataatcactgatgaaaccaaacaggcaacaccttttggtggcctgtggagagcgctgccccgtctgggtcttaggaaggcaattgaatatgaatgttctcccgagtgcttgtggaaaagagatggtgttggccactttttagacgaagagaaatgagtactagtgaacactaatcatagtgactaaacagtaaacggctcccatttgttgtcggctaaagcactgattcttcattttccatcccagcctgtcctgctctggcctgccctgtgctcaggaagctggcggtccccctcagtggatcttcacccacagggacaacctgctgcagaccgggctctacgaacagaacttctccccgcccccaagcctcttagggtgagacatgttgtcggtctgccattgttgctggtccctaaatagcagcaccctttgaaggatccttgaaccatgaccacaccgcaacaaagagtccttcatcaaactcgcttccaaatcccctcccaagaacaccttcagtttcctgcaagaaccctgactgctgaagccggattttgactaagcttctaccttgtaaaccgtgactgtgggattggggtcgaggcgcaatcagaggttgtataaggcactagatcaaggctgcctgtctgtcaggagtgtctgctttattcagtagtaaatgtgaattgtttttcattctgttgtgaatactgttggttgacaatgcagcagccatgccctctctatccttgctggttcaggtatccactctgtgtggctaagggtaaactctgtctcttgagaaaatcttggtaactccatttctctttccaacaattggcttcaaacaagctcaagtcaatgagtcccaacaggaagcctgctgggggttgtctggcaaaggttttctcactcctacaggaacataaagaggaaatgctcctttttccctggtgaatgttgcattccctgtctggatgcaatgcctggtgctccgcagccctttgcacttataagagaaggtggccggaagagcatcttcaccctggggtggccgcctgggaagatgagaagagcaggagtccttggtggcacaaccaggcaattcaccaaaatcctgctgccctcacctggaatttcctgctatgagagacgtctccgtttaaaccacatgagctggattttctgtttctaacacatgtcagcatcttcacggtaaatctaagaaaaaaaaatcagggctattaaaaaacaaagtccaactcaccctgtgctatggtctgaaggtgtcctcccaaattcacacgtggaaacctaatcccaaatacctgatacctaatcccaaatattaagaggtgggggccttgggaggtggttaggaatgggattagtgccctttaaaactgaggtttttgggagcctgcttgccctttctgccatatgaagatgcttagaagaggccttctatgaagcagagaacttttctcagatgccagatctgctgggaccttgatcttggatttctcagccttcagaactgtgggaagcaaacttctgtgtgtatgaatagccatctaaaggattttgttacagcagcctgagcagactaagacaccctgtgagtcagttatttttggctgtgtcacgagtgaccgcgagtgcaggagctgaaacggcagtgagtgggttaccatttctcaggaccctgcggaattggtgcgatggtgcttctgctccacctgttgttggctgggattgtcctgcagctgcattcttctgggg

SEQ ID NO: 186 - DNA, 658 bp, Homo sapiens
gcgagcggccaggctgcgggcggggtgggctggcgctcctgatccacctggaacacttttgcaaagacagacgcggttcctcctacttcagagcaagtctgggccagctgggatccgaccagaaatcgcaagcggaggagacgcagtagcgcaggctgagcgctaactgaaggcgcgacctgagcccggcgcctgctggggagctgcgcagccaggacagcggtcggcagcacagggcctgggcgcagggcccgccgtcaccacctcacgtcggaagccagcactgctgcccgccagccctgccgcctgccctcggacttcccagggcgcccagggtcctcccaacgcgcctgcacccacacccgcccctgagccacagtgaccttgcattccccgccccctgccacacctcctgcgtgcccgagtgtcacccttaaataccgctctacacccagagagggacgaatacacctctgaagacagggcaagactaatttcaatgggtcagaaggttcttgcaggcactgttttatttaagagtgcctatttactggcaggagtatttgtgtgggaggaagtaggctaagactgctgttgaacttgaagctaaacttgaatgccatttaaaataacaataaaaatatacttaaaacaccaa

SEQ ID NO: 187 - DNA, 1588 bp, Homo sapiens
cttgacacagtaagtgtttaagaactggtagctgatttttacaaagttatgggtcatagaaggcagtttagagaaaagggcaggctttggagtagctcagttgtattataaccttggcttctttactcacctaggacatacattctctctttagctgtagcttcctcccttctgagatggaaattataagccatctcacagtgttgtgaggattggagctcaagtgtgtaaaatgcctcctctgtgggctctccttggagagttcttgtatcctattgattgtcatcaaaggaaaaaagtggcaggatgatggcataagtgggaagaaccttgagtttaatagtctgaaaaagtggttacaggttcttgctatgcttttcctctctgtggttttctgaacccatcgcctaacctgaagccttaaacttcatctgcaaaaatgttttgtggcaggtgactctgaagcagaactcttgagatggaaggattgtcatctgaggaaaaaaaatcaagattaagagaggaggaactagaatgagattcacataccgtctctcctccaagggaaggagagagtggtgatgcctgcccactccttcctgggcagaacatttgtagcatggaacattggagaatttgcagtctgctgactttctgatttaggaggttgatggggaggccttataatttgcatttctaacaagttctgaggtgatgcttcaagtatgtccaggcagaagggctgcctcacagagaattctgccataccacatgggaattgaagtcacagacatctctaaccctcaagcctgaaaccaaaagactgaaaaccaacactacagtggacaaagaacatctctgaacttgtgtggggaccagtgacacaaggacctaaggtctctctcttctcatcttggcacttcagaagtctccccaatcttgacaaagccctggagaaagggccgggcctcccgttgataagaatatcactgcagataaatggaggtttcaaattgaaagaaaggaggagggcctcctgttgataagattattgtcactgcaggtaaatggaggcttcaaatagaaatacatttcagttacagaaaaaaaaattatctttgttacacatttgagtttgcaggcctaaggttactcccgctacactatcatctgtaaccataacgcactcaacattttaagctaactataaggattgttgcttcactcaaagatcctgaggttttattcactaacatttttatttggtgactatagttgacaagaacaaagctgtggggaaccaacaaacactgcaatgcctggcattgtcacctcactagattgtgagttcctctgggacagggtccgtacattttcttagaatccctcacttagccattagcctgcacagtgcttgtacttagtaagtgctcagtaaatgtttgtggaatgaatgcatgatgaacaaaatatatactgaggactcttggtgttgattcttgttgataatgtaatagttaagatatgttataaatatgttataaatattgtatcaaaatattgtatcaaaaatatacttgaacaggct

SEQ ID NO: 188 - DNA, 316 bp, Homo sapiens
ccacgcgttgactgccgtgtgtgactccagtcggcgtctcaacagtctccggtgtccacgcgttgactgccgtgtgtgactccagtcggcgtctcaacagtctccggtgtccacgcgttgactgccgtgtgtgactccagtcggcgtctcaacagtctccggtgtccacgcgttgactgccgtgtgtgactccagtcggcgtctcaacagtctccggtgtccatgcgttgactgccatgtatgactccagtggtctttctattttctcatcaaattgagactttggggaaactacacagcagcaaaccaggatata

SEQ ID NO: 189 - DNA, 6010 bp, Homo sapiens
tccggcctttgcttctttgcataatctcagctgagatttataatttacttgtgggattctcccctctcaaactataagttctgtgaagacagagatggtatttttttctcctcactttatttatttatttgagacagagtctcactatgttgcccaggctggagtgcagaggtgcaatctcggcccactgcacgctccacctcctgagttcaagtgattctcctgctcagcctcctgagtagctgggactacagatatgcaccaccatgcctggctaatatttgtatttttagtagagacggggttttgccatgttggccaggctggtctcaaactcctgacctcaggtaatccacctgcctctgcccctcaaagtgctggaattacagtcacgagccactgcgcccggccttctcctcacctttttctccagtgtccactccagcatgcagtatttgataagcgctcagtaaatgtttgttgaatgacttactaacctgagcttgtgttaactctctcactgtattgattctgaaaggcaaagagggcccaaggtcacatgtagggaagggccaaaggcaggactggagcccagcaattcttgttcaaccacacggaatgggaagtaaagtcctctttggccagcagcagaggggccaggtcccccttgtcatcagcctggaagaccctaaaggatcatctaggacaattctttcattctttgaatggggcatctaaaactgaagagtggacagggattgtctagagtcatacggtgaaggtgatccggaagttccgctagagaacacagcagattctatcctgtagaaacacaatgggttctacccagattgcctgacactcaatattcttttttaattaaactaaattaattaactactttttgagtgcagtgttgtgatctcagctcactgcaacctccacctctcaggttcaaacaattctcctgcctcagcctcccgagctgctgggattacaggtgtgtgccaccacgcccagctaatttttgtatttttagtagagtcagggtttcgtcgcgttggccaggctggtcttgaactcttggcctcaagcaatccacctgcctcagcctcccaaagggctgggatttcaggcgtgagccactgagaggggctctgacactcaacattctttccagtatccccaactctcctggaggtgaaggactaagggggtgggggcatggctctcagactccagactgacaacctaatattgaggctgggctgggagtggaaccgagatttcccagcctgaggccaatggatgacaagggcctttcttgttctcctccagagcctcttctggagccccactagggaattcctgtccttggaaaagtgggagaggaccagaacattctggaataaagactggagacattcagagtgacgcaagaagtacagtccacagtggaggaaaactccagctgccaggcaattgcccgctggtccctggcctggtctaggtggttgtgggggaaggggagctaactgcagtgactcacttaaccctttccgggcagaggaagataacgctttttaattgaagaaattttttaattaaaaaacatttttttgacggcttcttgttgagcagggctaccccacaggccatgtgcctagagtggccttaattgaaatttttgttacaatcattgtagattcctgtacagttataagaaataaaacagccgggcgtggtggctcatgcctgtaatcccagcactatgggaggccgagacgggcggatgacgaggtcaggagattgagaccatcctggctaacacggtgaagccccgcctctactaaaaatacaaaaaattagacgggcgaggtggcgggcgcctgtagtcccagctactcgggaggctgaggcaggagaatggtgtgaacccaggaggcggagcttgcagtgagccaatatcgtgccactgcactccagcctgggcgacagagcgtctccaaaaaaaaaaaaaaaaaaagaagaaataaaacagagaggctgggcacagtggctcacgcgtgtaatcccagcactttgggaggccgaggcaggtggatcacccagcctgggcaacaagagggaaacttcatctcaaaataacaacaacaacaaaaaagaaaacagagggatcccaggtacccgccttcactcagtttccccaatggtaacatctcgcagaactactgggcgccatcacagccggggtctgactgctcttgctcaggtttccccggttttccgtatcctcacgtgtgtgtatttacttctgtgcaattttatcgcaggccaaggcaggcgtgagccactgcacctggccccatctttctacaactgggaaaattctgagttctggaaccatctgcccagggatttggggtcagagatggtgggcctttctgatcctggtctttgccatggttatgattgtggcatccctgcctgtcttctatcatgtgcctcagcctgttttttttcctttgccaggctgcaagcccctgatatcagactaacaggagcacaacattgcacggtctaaagacactacattagggtgaaattttgttcttctatcttccccccttgcatggagaggaccctcattcctgcccccaccctcgcttcactgtgccaggcacaggcagagcccaggtgctgcctctgcttgtctgcagttgccgacgaggcctgcgctgagcattttggcaagtctggagaattgaaggcccaggcccttggccctatcaccgcaatgcaggcccagaggtggcaggcgggagctcaccgatggatctgccagtgtcagtcccagagcggaccccagaagtgttcaggcgtggactcgcactgtctgacatttccatcgatggcctgcatgaggaatgggcggtgagcatcctccttccatctccagctgggggtggagggtgtgagcctgcccgccgagaggaagccagttacagaatcaaaatgactcaggctgggctctgtggtgcgtgtctgcagtcccagctgctctggaggctgaggcaggagaactgctctagtccaggagttcgaggctgcagtatgctatgatcatgcctgtaagtagccactgcactccagccagggtaacacagcgagaccttgcttctgaaaaacaaaaacaaaatgactcacagaaaggcggagtggccagaaatcagggactgggaacctgtgggggaagaaaaatcactcagcagtggtctcctcccagccttcctgcctccaagtttgcccctctaatccgtcttacagagcttccagcttaatcgttccaattaatcctcctacctgagccagcaaaccttcgctgttgctcctacttgcttccaaaggcagttcagtgtctggccccactgtctttccagggtgtcctcctcctcccggaacacaactggctgcccaccggctgggcgcggtggctcacgcctgtaatcccagcactttgggaggccaaggccgacaatcacctgaggtcgggagttcgacaccagcctggccaacatggtgaaaccctgtctctacaaaaaatataaaaattgaccgggcacggtggctcatgcctgtaatcccagcactttgggaggccgaggccttgggtggatcacaaggtcaggggatcgagaccatcctggctaacacagtgaaaccccgtctctactaaaaaaaatacaaaaaattagctgggtgtggtggcggatgcctgtagtcccagctactcgggaggctgaggccggagaatggcatgaacccgcgaggcggagcttgcggtgagccgagatcggggccactgcactccagcctgggcgacagagcaagactccgtctcaaaaaaaaaaaacaaaaaacgaaacaaaacaaaacaaaaaacaaaacaaacaaacaaaaattaacagggcatggtgacacacgtctgtaatctcagctacttgagaggctgaggcaggagaatcgcttgaacctgggaggcggaggttgcagtgagccgagatcacaccactgtactccagcctggtgacagagtgagactccgtctgaaaaaaaaaaaaaaaaaaaagaaagcctttgtccatgctgttctctctgtctggaacagcatcacacttgcaggccagctccacatcagaggagaccctctttctacaactcttgagggcctctccagtcctccagccccactccattccacatcctcacagtcaacacagccccacttgcctggactctcagagcagtctcccaataggcctccctgcctggggataagtcccagctctcaacctggcactcgacggccttcctgatcagctgggctccagcctcgtgattcccacccactgtttgacctgacacagctgcttaagtttctctagttcttctagattaccctgttctcccactttgagaccttcttatgtgtagatttcctcttcctggagcacttttccctcccctcttggcccgcctaacttttactcatctgtcaggaagccatgttgattccacctcctccaggaagccttcttggatttagggtccctcctgttggctcccagaggtcccatatcccttgcatcatcacaattcctcctccagattgaagctggctgctttgccagtctcctctaggccatggtctcctgaggacagagccacacattggcctctgtctcccccagcttgatcagggcaggaggtgcccaagaaagcccagaaggaaggagtgggaaatggtcccgcacatgtattgagctcccgctccacagtgagccttttacttgcagcccagtagcctggatggctcggcctttctgacatggagttaggtcaccatctggtcacagcctgcagccccaagctcttctcttttcatctagatagtgggcataaccctggatcttaacagcctgtgagatgcaaggaaacaccagacgccaagggctcatcccagtcccgggtagatgattttaagcatttcgtgttcctatcattggtcgttattggggctctggagccaacctctgtggcttcaaatcttggcttctcctctcctggctgggtgactttgggcaagttacttaacccctctgtgcctcagtttcctcatctgtaaaatggaactaatcataagctcattttctctgtttctcagggccctggagaggattataacaattgatatgcatgcagagtttgcacagcacttggtgcaagggctgggcaaatgctggctgtggttgttattatctcggggtcaccctgagcatctgataccagtgaggagactctggcttctggggaatcttccagagctgcagatctgagcctggcaggaggaactcttagaccttgtgaagactgaattcctgtcccctgaagctcttgaaaccatcccatccatgtctgccggtcagagtcaccaggaagttcttccttgtatctatcctaagtctttcctgcgttgatttctctgggttcccatccaggccggataggaagacgagggaaggagccttaagggtgtctcaagcatcaatcccagaacttcccagctcagctcagaagccagcaatgtgagtctctggctcctagggggccaagagccaggaggggagggtttgcctggctcagtctccttcgaaggtctcccagccacagccagatgcaaaaccacctttgttccctgaatttcaggccgtgggagggaatggggccagcgcctggggtgcggctggggagggaggaagagatgcaaggattgaaaactcgagggaggcctagagcagcagggaggcaggacagggcaccctgggcagccagataggggcaggggtgtgggaaacagagggcgcagagcaggggccagcggggctgggaataggagcctcggggaggccggtgaggcgcggagagggaggcctcataccagacactgtct

SEQ ID NO: 190 - DNA, 426 bp, Homo sapiens
cggggttccctgcgtggctcgcaggggcggggccagaaactgccgcgatgaatgtcagtccccagagccggaaccgttcccggttttctctacttggatctgagaactctgtccctccagccctgcgagcgctttgccagggtgacgggcggaaatgtccccgcatccgtgcctgctttcccagatgggaccctccagcagtcccctccactgcccgtgcttcctcctaaccacttccccccagcgaccgcggaaggcgcttcctcccccgcagcgcgagccccaagctcctccagagccccagctctccccgcccccttcccgaccttgtttcatatgacccctcccccgcacatactcaatttcgtcttcccaaggcgcccactctccacatcctgatgaaaaaaagagccggctgctgtccta

SEQ ID NO: 191 - DNA, 882 bp, Homo sapiens
ctggaggactgtgggtattaggtgtccaagaagaaagctcaaatctgctgacggcaggtaccttgcttgggatttactatccgacaggggtccgaacgcagcccgggaacagaaagaaagcaggttatttacaatctaccggagcctaagggcagaaggcaggggtccgaacgcagcccgggaacagaaagaaagcaggttatttacaatctaccggagcctaagggcagaaggcaggtaagggaattcttgggagctgtggggttttgtagactggatcccaaactttgcagtattagccaagcctttgtatgaggtcacaaagggggcggggaacggaacctttggaatggggatcccaagaacaaaaagtctttcaggagttaaaggaaaaacttctggcagccccagccctggggctacccgatctgacaaagccttttccattgaatgcgtcagatagagaaaagatggcagctggacttttaaccgaaactctggggccctggctgaggccggtggcctagttgtctaaacaactagagagggtttctaaaggatggcccctcatgtttgagggccgtggcatcaactgccctgatagtacaagaagcaaataagctgactcttgggcaaaacctgaacataaaggccgcccattttgggttgggtgacagccatcccctcttccccccctgccttaggacccccatcgcgtatcctaagatccttaggactcacctggaggactgtgggtattaggtgtccaagaagaaagctcaaatctgccaacggcaggtaccttacttgggatttactctccgacgggtcgatgccacccgggaacagaaagaaagcaggtcatttgcaatctaccggagc

SEQ ID NO: 192 - DNA, 599 bp, Homo sapiens
gggagctacccctcggccgccttccagctggggagccggctggagcgcgggctgccctcctcctccgctgacaaagacgaggaaacaaaggcccaaagaagagttccgcccgggacggaacgtggcatagctcgcaacagaacccagtctccggagatccctctcctctgcaccacttggacgttccacggagaggcagcggtgcgcggggcgacggggagctgccagagaagtcagtggtgggcatgagtgggtgagacgggcccactgaggtttctggcagtggggagccatggaaagtttctgaacagagaagcacttattgggaactgtcagagctatgcttcaggagatgaatctggcaacaacgtgggttaatattaatgccctgtacatcctgagtacatgtttccagaaagaggtgatccaggaggctgccaagtggcctgcaggtgacatccagagggcagaaaatgcccatgcaggtccacgtgtgggtccttaagccccttgaggaaaagggaggagaaaaggacaaagaaggctctccctttcccttggatccccttctactcccacatgcctagtgggagcctccc

SEQ ID NO: 193 - DNA, 2757 bp, Homo sapiens
acacacacacacacacacacacacacacacacacacactcttcaggccaataccctcgatgaacatcaatgcaaaaatcctcaacaaaatactggcaaaccaaatccagcagcacatcaaaaagttaatccatcatgatcaagtatgcttcatccccaggatgcaaggttgcctcaacatacacatatcaattaatctgattcatcacataaacaaaactaaagataaaaaccatgtggttatctcaatataagcagaaaaggctttcaataaaattcaatgcctctccatattaaaaactctaaaaaatctgggtattgaagaaacatagctcaaaatgatgagctgtttttgtatcagtatcatgctgttttggttactgtagccctgtagtatggtttgaagttgggtaacatgatgcctccagcttcgttctttttgctgaggattgcttggctattagggctcttttttttggttccatatgaattttgaaatagtttgctctagttctgtgaggaatgccgttggtaatttaatagggataacttgcatctgtaaattactttgggcagtatagccattttaatgacattaattcttcctatccatgagcatgacatgtttttccatttgtttgtgtcttctctgatttctttgagcagtgttttgtaattcttctagagatctcctagagatctttcacctccctggttagctgtattcctaggtatcttattttttctgtgtgtagcaattatgaatgggattgtgttcttcatttgactctctgcttgacttgatgtataggactgctagtaatttttgcacattgattttgtatgctaagactttgctaaagtttatcagcagaagaagctttggggccaagactatggggctttctagatatagaaacatgtcatctgtaaacagagacagtttgacttcctgtctattcctctcttccctcctctgtttggatgcccttccagttttgcacattcagtgtaatgttggctgtgggtttgtcatggctagctctcatcattttggcacttctgactagaagggcaagaggggccagtgttgttgttacctgaaaggtaagtgcagcccacaaaaatgcagtgaagaagaagatgtattatgcatatgtttaagttaatacaattgagatatatttagcagacagaatcaatagagttgatgagtgactgactggatgtgtggggagtttatatcactcccaggtttttgacttgggcaaccgggcactcatgaaggaaaaaggggatccagggagaggaacttttctgaggactggggtagggctgaacagctgcattcgaggctggtggagggtgggctgggcatgggatgcacaaatggaaattccactgggtctgcagctcacacataggcatgaccagcatagagatagagaggccccagtgctgctgagtaactgtgattccccaggtgatggcatcagctgagaagggaaggaagcccatgagaggacactgaagaaggagtgagcagacaataagaagcccacagaagacagagaaggaacaactagagggagaagccaaggcaggcgtgtgtggtaacacataggaactgagggagaggacatttcaagatggtggggatgccatacaacaggactatgtgatggtttttggctgtgtccataggaagtcacaacaggcaagggaaagaaaccagaacccagtcatggagttaagaagtgagtcagagagtagatgggtagggacagtgaggtaaggcctctttctaaggaagtttggctgaaggatagactagctggacacatgctggctgtgtggggtagagggaggaatgatggagggtaggagagccttgagcctgcgagaagagtctcttagaatagagaagctgaagttaaagttgtggaagagagtggggataactgagtgacagataatcaggagaagaaaaggagatccagactcatgacagagagatgacctttgccaagagcacagccgtctttcacggtcacagagaggtaggacaaaatgagtggtgttcaagaattggtttgtagcacaatatttcaactatgtcctttaaaaagtttctccacagacactacccaaagcagtgcttcactacagtggcagacagacctgaaaattttcatctgaagcagcagagtgaactgcagaggcaggtcaccaaccagtgtggaggctaaaagcgggcctctttggggattccaggtggaagtgttggacatctgtagtattcctggtctcgaatcatcctgatattcttcattttgttattcacattggactaggcaggaacaaagatcaccacaactggctccccttcaactatgttagatggcaacttgccttcagtatggtgaaacacatcagttaagaccggggttgtgcatggcaggactttctacaaggacacccagtctccttaataaacatgagatgctctctttccagaatttctcttgcctgacacagcataggaagatgctgaacggccacacagtgatccattgagatagaatctcactatgttgaccaggctggtcttgaactcttggcacccaagcgatccttttgcctggaatcccaaagtgtcagatttactgaagaatatttcattgtaattactttttatactttataggtcaagagctctgttttaaatacaaaatttattgaatatactttttcaaac

SEQ ID NO: 194 - DNA, 1308 bp, Homo sapiens
gccgaggggaccacgggacgccctccttcccttctcaggaaactggcccctaaagtgatggagtggctgtggagtcttcagtttgcctgcatgccaggtgcaagccaaggagttgtaagagcatccccctcataagctaccagtaggccaggactccagtgtggagggatggatctctgaaggtcacagcttggcccttctctgaagaacgtccaccagcatgtcagcccagctgcactgcaggagtgaagggtgagatgactgtcaataaggataaaggccatcttccccacccgtcactcatcctgccaagccatcactgggtaaccaggactcatgggcagtgtcacctctggggccatgctggcatctgtaacctccatccatccttgtggtcccatccagccatctctgcccccttgcctggcccattctgttgtgaagttttcgtccaccttgctcttgtgcagagtcggaattcacaggggttccaatgcccaagggaagcccattggaactgtttactcttattactggctagagacgtccacaggacaaatcagcttcagattataccatcgttagagtaggtgcaactggggggcttgccctacttaactctccaatgcaatccatgctgccagcttcatacagactccatccagtgcaaatggcttccttctgtgtgcagagcaaatgctccagggaagagatacagaggattccccatcatcattgttgccaagtgaccccaaatattcctatcctgtctgttgtaaaaaggaaaaatcatgtcttggaagaacagcatcgccctacagatacagactaggcactttgcacatgaaacaagagtcccagaaatttctagaagcaaatctcgcattcgtgaccgccagacctacgggatgtgtaaggcacattctcaatctcatcacttgtgagagttgcattgcctagtccagcagccgtgaaggactctctgctgtttttcctctgcttcatttgacacatgagagagaagagatgaagatggaggcgggccctgccccggggacatgtatatctctctgaatgtccttgacagacagcagcagcccagcaatgcccagcccccatcctgtctgtatgcaccctggtgagcattttctacagtctcctaaacgctcccattattctgttttgcaggtgtgatgtgtggcacctcagtgttgtcatagcttctgcctcctccgtgtggagagagggcataaagacagagctgagatattatggctattccagaaaataaaatattttttgaaacca

SEQ ID NO: 195 - DNA, 1514 bp, Homo sapiens
aaagatagctcctgggtgaacggtggtttttgtaatgcagtggttgtcacgtgtgccacccacgcgaaatggaaactgggcagaaatatctccttatgggtctctctctctccctctctcgctctctacttcagcttgggtaatttgtttcactaaactcaactcaagctctcttaaacccaggtctggtgcttaaaacaatatgtctttattcccttacaggtctaggggtcagaaatctgcaatcagtttcggtggaccaaaatgaaaatgtcaaacagggtgtctgacaccctccagaagcaccagaggagaagcagctttccttggccttcccaggttctacagggacattccttggctcatagctccccctcccattttctttctttcttttcttttcttttcttttcttttcttttcttttttttcttttttttttttttgagacagagtctcgctctgtcacccaggctggagtgcagtggcgccatctcggctcactgcaagctccgcctcccgggttcacgccattctcctgcctcagcctcccgtagctgggattacaggcacccgccaccacgctcggctaattttttgtacttttagtaaagacggggtttcaccgtactagccaggatggtctcgatctcctgacctcgtgatcagcccgcctcggcctcccaaagtgctgggattacaggcgtgaggcaccgcgcccggcctcctcctcccgttttcaaagtcaccagcgtagcatcctgattcaagatcacattgtcttcttttttttttgtagccaaatctccctctgcctctctcccctggtgacgacaatggctggggtcttgacttgccaaggtaactcgttggggagcagagagtgggatccgcagtgttctggtggctgttgggatctgggcgcgaggaaggagagtggctctcatgattctctgcattctcagtgcagcgtggcccgtactggtggggccactgctaccgactaagcagtacgggccgcctggaagaccgaaggcggagttcgctgatgcggaagccaaggcacagggcaataaggatccgcgccatttcttgtgatgtcacctgaagccttggcgggtagctgcctctcatccattcggaggacagggctccagccaccggcagctctgaaagagtttgaagaatttattgttcacagatggtatttaaatggacttatttctaaaagtcacattcctttattacttatttgttattagaagtacccattttcatatgtgtttaaaactatttgtgtctcaaattctcaggagattgatgcatcccagtttactctttttggcatatgtttttactcataaattaggttaaatttcatacttgttttataaaatttagttatttggttacattaaaatatttgtatccagataagaagtctcttccttctcctatgctttttttggaatttagagcatatctgaaataaaattaatttactttttattact

SEQ ID NO: 196 - DNA, 1436 bp, Homo sapiens
ctagagtctcctgctcctccattcctgcttcctcctcacgctgcccccacatcctccccaactcaccttcatgctacatctcggcaaatacagctcatatccaggcacggtgcagcccttgacagctgggtccgcaaaggcagatcggatgttctgccaattgaatggaaactgtccatagtggggagcagagagcctcatcttttctggaactgaacatccatccttaaggccagatttctcccatcaccaactttaactcctgccctagccctctctcttccttttcaaaaccctctccacccaggaagggagattctggagccaagactgtaccagccacacctccccagagttgttaaggaaggaactcgaagccaggggtggtcttctggcaagcacccccactaccagtagcaggacagatgtgtttctaatggactacactatccccggaggtcacatgattcaggctgccaagggtacctgcccttgggaaatcaactcccgaagataaattgggattgggtcctgagaagatccatggaagcccagaggaccctgcctctctctgttgcttcatgctgtagaggcagtactggggagggcctgccccacatccggcagggcagctggaaccatgtgtttgatgacactctgctccctcaatgtggagcctcatcctcatctcacagtctagcaggcctctggtgggttaggcttgtctcacccagtgtgtgagtttttttggaagtgacctgattttggagtttccctccaagcctttctcaggtacatgctttctcttttattctgtcttctttttttgatcttcttaaatctgattttctcctttttccctctcttgtctccatcttttttccagtctctcgcttctctttatttctccccatatttcactctgttctctcaccccaacctttcccttctgtttctctccctccctctcttcccaccccctgcctggccttccatatatcaagcagagttttatcaccttatgcaggggcagccctgccacctgccataaagttgataggctaatgacattttgtggatattgccatgtcacaagtccaggacagcatcaaaaatagccctgatgtctaaaccacttcagctatcttttttatttttaaaataaatacattcacatgcttttaagaaactataaaaatatataaagtaaaaagatctttctctcacactgtctccacctctcctggtctcaccgttgtgcttaggggaaaccattgtgattagtttctcctgtgtccttccagagtgtctttatgcaaatgaaaattattgtgataatatattcctattttcccccttactacacaaaagatagactaccataatcccattctgcacttttttttcacttgataataaaaacatgattttattaa

SEQ ID NO: 197 - DNA, 302 bp, Homo sapiens
ccaggctggagtgcagtggctattcacaggctggagtgcagtggctattcacaggcgcgatcccactactgatcagcacgggagttttgacctgctccgtttccgacctgggccggttcacccctccttaggcaacctggtggtcccccgctcccgggaggtcaccatattgatgccgaacttagtgcggacacccgatcggcatagcgcactacagcccagaactcctgggctcaagcgatcctcccacctcagcctcccgagtagctgggactacaggcacgcgccaccgcgcccggcgg

SEQ ID NO: 198 - DNA, 462 bp, Homo sapiens
tacggagacgctatttccctccgaactctgaagtagccagaaacagattattggccgaggaaaaaccaatttcgctctaaaggataagcaacaaaatactgaggggggaaaaagcctacacaaatggaaacatacggcacaaaatcaaggagcgaccagttccgcatggttacactaaaatgcactgcactcccactctctggcttggctgaagataaccagcaagctctgaacagtttaaaagccttccaaggactgcagcagcactggacacacaagagagtcgagaacagtattggatttattgttagggttacaattttcacgatctttgcatgcaaaacttgccactctgagcccagtgaactatttttatttggtttacttactggctttctggatgactaggtagagctttaactaaagaacacttctgctgtggtctgtgatgatgaattttcc

SEQ ID NO: 199 - DNA, 255 bp, Homo sapiens
tcagatgccttcacctgaccactgcttggtgatcccatggcactttgtacatctctccattagctctcatctcaccagcccatcattattgtatgtgctgccttctgaagcttgcagctggctacatcagtccaatgtgaataacaaaatgaagaatatcaggatgatttgagaccaggaatactacagatgtccaacacttccacctggaatccccaaagaggcccgcttttagcctccacactggttggtgac

SEQ ID NO: 200 - DNA, 2622 bp, Homo sapiens
tggaatctgattttaaagaatggcccagcagatgaaggtgtttttttaaattgttagtcatgtgaaacgaactgagtattgatcagtaatacagacagggcagctgtgagagagtttgatgctaatctttgcagaactcaagaacatactccataaagtacagctgaaaagatcacgaaaaccttggagccttcgaggaaagagaagggtgacttggggacacaatcacaggaagggcatatggatccgagcatccagggtggttactggggtgatcagacaaataagcattgatgcctggaaggcagaaatcacactgcgacatcaaatgtttcatcaagcaaacagcaaggatctcttcaggctgtgttctctagacccgaaaatgtcctctgtggtttggctgacaaatggaatctctttagaaaacatgcaaaagggtatctcagctatccatgaacgattcggtctaggacaaagaactaacagttccttccaaaatagaggtctgttggtctgtttgacgtcatcccatcatcctatctctccctgtccttgtctgcagtagaagttaatgtaatcataccagatgtttaatgtgaacaagtaatttccaaatgtagaaacaccactgatgcacttagggggaaaaacagtggcagggtgttagagcatctcatcagaggtgaaaatcacccacttggaaacctactgtgcacccgttgtgagttctaagagtgtatcagaaagctgattttaccatctgttgtgaaagattatctgcaatgagggctgctagaaagtcagcctgctgatctcacaagtatatgacttcttattccacttcaaaagtggggaacttgacaagtttcttgtctgccttttgatgttgattctatagattaattagttcaggaacaagtctttcatatacattagactggtatcattgagttctgagctattctgttgttctttaactgacactctggattgccagtgtcggctgctacattctgatacagtaagtcaaaggaatctagtggccaagagttgtagtttagaaacaacccatctgaatactgcttttaccactttgatacctgaaaagatcatccccctttctaaaacctgaaaacaacatatagagaaatactgtagaaaccattgctagtgtcttaactaggaaaagcaagtagactcatcaacaatcctttcaaaacaagacctagagataaacagttttttccagtgtcaattttcatagacatttttaaaaaattaaacacatcttgtcacccagtgctagcaaaaattgtaaagagcaaaaccaaagtttttgatgttagtcttatttttgtaagcagggtatactatagtcgtggcccatatggaacacacaggcagccggttttctgctacctgagccttggagaagatgagaaggaagggctgcctgctgtgctgccctttgaaaaggtccaaagcagacaggagcgcacacagcagaagtcaccttctccttctgatgaccacctttcaaaaggcttaacagaatcaccaagtgtcacagtcagctcttggccagtggaaaattgtctgggcctgtatatgttggaggaactcagatagaaaaggacttgtaaacagcatggaaacctcaacatctgctgtctcaagcacttaaaaaaggctacaattcaggtgttactggatgacttaactgcatggacatttaggggctgacttgtgttgtgattattccaattgtgggctttggagaagcagagggatgattttcagttgtgtgggtgttaagtctatggattgggaatttaccactgaaattgatcgttcaaagtgtgacttcatagtagggccagctcctcctaagttgtccttttgtttttcacataaaatacatctggtactttttacttggaaagttgtactatgtccatgaaaatggttaaatgagaaggccataaagattcatttaatagctgaaaagcaacttttaaaatagaataggacgaatttaacatggaatgatgtgaccttctagggaactttttatagagagcttacatagtgtaattggggagaattttgtcttctatttccattcaacagtagcaaactggtggttttataaaattaacattatagtatgttatataaataaacgttatataaaatgacattaaagtataactgtgaaaaattaaagacttggcgttatccacaacctttatgtgcaataaggaaaactgcagtaggcccccaaagtgccgtctttccctagcattttactcaatgtttgcctttgtgtatgtttagattgctattgtaaagctagccatgtgtgttcctgccctttactgatatttaacacattttctcaaagcttttctttttttaaaaaaacaaaactcaaaataaaacaactaactggctgagctaattttgttttgtattttaaagtaaagtatcatctgttggtagaaggctgtagtgtgatactattcttagtctgtttccctcactgagaggttcttttctgggtgtaagctattcctctccagctttctttaggcctggggttggcaaactacagctggc

SEQ ID NO: 201 - DNA, 1753 bp, Homo sapiens
ccttggggccgcgagtgggagcgggagcggttctgcggcctcctcgggcttcttggccctgggcggagtgggattgggtgtcccggctgttcgcagtggccgcgagtgcggccggacctggagtagtacctgagccgctctggccgagcaaggcgcggggccccggtctacaccgcgctggacccggctatgccgtgacggaattcccgaggccgtagcgccacgcgagacgcgcactgctcgcctcccttccgccaagattcacagaacacggcagagtggcctcgggatcacctgcccaagacacctgcacgaccggaagttgggagaagaaattaaggccatgatgatgaacgcagcctttctcgtttatttccaatcccacaacaaaccggagtccaggaactcatgggaggccgaggtgggcggattgcctgagttcaggagttcgagaccagcctgggcgacacggtgaaaccccgtccctactaaaatacaaaaaattagccgggcgtggcggcacgcgcctgtagtcccagctactcaggaggctgaggcaggagaatggcttgaactcgggtgggggaggttgcaatgagccgagatcgcgccgctgcactccagcctgggcgacagagcgagactctgtctctgaaaaaaaacaaaacaaaacgagaaggctttcaaaattactctgcggtacactaatttaacagattagatcactttccaggctttaagttggcctttgttctaccctttttttagtgtatgataaaagttgtgttggttcgttgatcagcatgcaatgaactctggctcttgttaatcaggtgactacagttttgtccttacatttgtatgtatgtcatgagtggttttgtatgggcaggaggtaaacaacgcacatttaaatatacttaatgatttatcattccaatgttttctggttgttttagtctttcatttgtctcttgaacaatctgaaacatccctattctaaggctaaaaaatttcctttacaaacttaggttaaacattcctaatctgaaatccaaaatgctctaaaattcgaatttttttgagtactgacgtgaccccacaaatggaaaattccacacttgccctcatgtgacactgggtgacagtcaagtcacaatcaagcctggtgtggtgggcacctgtagtgccagctactcgggaggttgagcaggaggattgcttgagcccaggagtttgagtccagcctggacgatatagccagaccctgtctgtaaaaaaacaaaaaccaaaacaaaaaaaacaatgaaaacatttttttttaaaacgccatcaaaactttgtttcatgcacaaaattatttaaaatatataatataaccttaccttcaggctatgtgggtaaggtaaggtgtatgtgaaacaaatgaatttcccatttagacttgggtcccatccccaagatatcttattatgtatatgcaaatattccaaatcaaaaatatctgaaatacttttgtcccaagcatttcagataaaggttactcaacctgtaataaaaacactcagtgcttgcctgaaggaaaaaccaagaatttgtcatccatccttaaatttttatgacaccctttgtaatcaggaaaccttttaatacctaagaatatatttgatatattctggtatatgtttatcattctgatgtttaatgttctatgttgggcatatatcagtgtaataaatacattagatccaaa

SEQ ID NO: 202 - DNA, 240 bp, Homo sapiens
gggtggcccaatggggagaaaactaaggattcggtgttgggaccactcctgccctgacctgccctgtgactccgtcatactctccaaaggccagaccctcctagaccagctggaaccaccatcaagatgtccccagccatgtcagactctggggccccaggcggagggcaaccagatgtcttcagctccaagtctggcctctcctcccagcaagcagccattacagaaactgaggcttgg

SEQ ID NO: 203 - DNA, 346 bp, Homo sapiens
gttagttcctggatgaagtacagctctgaagtcaagtggatcctatacaaaccagaaagacaaaggaatatgaggagacctcatcaggatggaaatcacaattttaaggcagatacatgtttttggaagatcaaccttatgcaatattgagttcatgaaaatgaggaggtctaaaagtagggtgaccaaccatcctggtttgacaaagactgatagatatttcctggggtgcaggaccttcagtgctaagactggggaagtttcagaaaatgcactgatagtggaaatctaaagtatactcagaaatatgttgatcgtcttatctaaaagatggtgacagattgtg

SEQ ID NO: 204 - DNA, 2207 bp, Homo sapiens
gctgcgcgcgggccacgcgcggcggcggaggctgcgcgcgggccacgcgcggcggcgacttgggctgggcggtcgccctgccccaccgcccttcggcgctcgcaggtccgctcccctcccaaaccgcagagcggcaggcgcggccgctggttcgagagctcggccggggcagcgcagccgccggctgcccctcgctcccaggcgccacaaccccgcgccctcgccgctgctgcgtcccgcgagacctgtggggaggccgggagtcacttcgggttccctttcagcccacgtggtcctgggacactccacccaggaacctagtcggcaccgcgcagggaatcccagcagcggggttctggccccagcacgcgttgcggcagcctggcgagcgtccttgcggcctccaagtgccggtgggaaaaatcatgtcttcttccagagtggggctccgtttggctgcctgtttactaaacgtttcagaagccggaagaaaatacattgttgagaacatagcaaaagcagctcttcttgacaaaaatgaggaaagaaacatcctcaagtttcagtgctcaatatattttccgatcaagactacaagagatcagtcattacaatagcaacttctgttgataagttgggccttgctgaggatctggtgctgcatgttcctggctgcagcgtgtttctctttggcgaagctgacctgcctgagaagcgcagtcttgtgcagagaaggaagcagctgggctggttcacgaggagggatttcagtgctcttcagcctgacctgggagctgccccttcccaaagatgtggtttaacagagacgaggtctcactatgttgccctggctagtctccaattcttgctgtctcgcgagcctcccatcttggcctcccaaagtcctgggattacagggatgagctaccatgtccagccccagatccaactctaagaaaacacagtccatcagtcactgaagagcacgtcagtgtatccgtctctccctgtgtgaatcctgttacttggacttgtgtagaggttgcagtttcatctttcgtgtagtaatgactggcatcaatttatatcgatacaatgaaaaattctaaagaacactttgtggtagagaaataaaggagatctcgtctttgaagatgcagaatatggcaagtaactttccagtaaatcattctattttagtggaggagttttgaaggaagataagccctgagtttcctgattatgtataattcaaaaatagatattcaaaagtctcagagataacattcttctgtatagatagaagagtttgctttgtctatagatcccattgtacagcttgaagaagagaagaattattttctcaaaatctcaaaaatcatatttctgcaattttctcaatctcagaatcacatctaatttctgatcaaattggcaacactctctagttctaagtgttcagttcatctggaaagaacttggtgcaatttgtgtaattactttacagctatctgcaaaacaaactgtgggagtcacgtctctgtcgatgaatgtatagattcaggtcactagaacataatcctgaaactgacattctctgtaagatttttctcctctttcggttctccttttttttttttttttttttttttttttgagaaagggtttctctctgtcacccaggctggaatgtagttgcacaatcacgactcactgcagtcttgacctcctgggctcaggtgatcctcccacctccctcccaagtcgctgagaatacaggtgtgtgccactacacccagctaatttttgtattttttgtagagatgggttttcgccatgtttcccagcctgtctcctttcctttttatgattgaatccttttgaaaagaatgttgttttgttataaaattttaataaatgaagaatttattttggtgttaaaatcttaaaccctattagatggtaccataagggtttgtattctactcaggatatgtccaaggaaatgataggatttgtttgcataagatggtaacaatatcttatcttttgaggctaatctttaaaacccaagagtatgtgttaattgttgggttgtcctttttcttctatagcatcaaaatattatataagttattgttaataattttcaatgaattctttatgatttaaataaaaatcattcttattgggctcatatgttttac

SEQ ID NO: 205 - DNA, 211 bp, Homo sapiens
gaaaaactgaagctacaaaatggcctggtttctcacttcagttaaatttgtgcttctgagtgcttgtattgtaggtgaaaccgcactgagaaggtatttgtggcccgtatgctgattgattgatgagacttctttgcacaggagagctgctaaaaattattacggtgaacagtcttgttccagtggttcatcggtgacttctgtggcttcg

SEQ ID NO: 206 - DNA, 277 bp, Homo sapiens
cggggccttagcggacggaggggagcgcgggggtcaccgggccgggccggcagccctagagctcggcctggcggggaccctgggccagccccgcgcctccgtggcccgggcgtctcgtgcgtgtccgcgaactcgcgtgcgcgcgtcacctcggaccgcagcatggctcggagggcggccctactcgcgccgccctagtgctgcgaagggcctcggagcccaaacccggaaccgccatctgggactgggaagacgacatggccagaagccggcggga

SEQ ID NO: 207 - DNA, 315 bp, Homo sapiens
gttgatcagaagtctgggttaaatcctttagtgagtccatcctgaccaggtgccacatgtgccactctgccttctgtagtagaattggaaggcaacatttcagttccagtgaaactatattgcctttatttggaacatctctaaattcctctttcagaattttcttctgaagtttactttttattttcacaggtagaaagtcactgccctttggagaatagatgtttaccttttccagaaacagtcgtacctggtttaaacagcttatcaaggaagggcactgaagagggtaggaaagacagtcttgaattgctg

SEQ ID NO: 208 - DNA, 2867 bp, Homo sapiens
taggtcagaagctagaatctatataaagtcagcttttgaaaataaagacagacaaatctttttttacattattataaaagagctaagttgcaaacaactatccttgagaccagaccatttttttttaagctgaaattttctaataattgcaatggcaaaacaccatttgcaatttcttccctcccacctcccaggtggttcaacaattccacttccaaacagcatttcccatcagtttttaaaagctacttacaaagtgttattctactaccacttttaaatacatcaagcacttccaaatatctagaaagactagatatttcatataacttgtccaccacatacacatcactgttaaataaaattgcacacacataacaatggttatcatctgaggtatcttctaaatgtggccattttggccttgaatcattccctcctcccttccttctctgccttcaatccagtggacaagtacaggcacatgtaatgcttagagatggtcgaacaaattcctatgcaaaagtctttacagaagacaagttttcctatgaattttaacacaaagcgtacaaaatatgctaattttactactttgtcatacactggcaacctctttaacaactagagactagatgttgaaaaattaggactatttgtccattatatatactatatacagagcaaaacaaaatgcacaaaacgtatagaaaaatggtgtctgaaaatgtccaagtatgaacacactagtatattacctcttgcaatttcttccctcctacctcctctaaaccattgaacaagtatacacattactatactgctcacaaaggtggcttcacaattcaatttccaaaagcatttcctatgaattttagcaaaaagatatttacaaagtggtattttactacctatacatttaacatacatcgggcacttctaaacatctagatagactagatgtttcaagtaaggagttaatttgtctactatgtatacagcagtcttgaataaactgcaaacatgtaacaacagttataatttgaaagagtcttccaaatgtgaacattctggcctagaacccttcccatcgccatcaacccagaagacatcaaattttcagaagacaatctttcctaggacttgtaaaacaaaatgtacaaaatatattagtttactaactctacttttgtcatacactggcaacctctttaacatccagaaagactagatgttgtcaattaggactcgtctgtcctttatgtacattatatacacagataagtaaaacaaaatgcacagacatacatcttgcctcgctgtaaacaggatggcatagagctctctgcacctccccctcctctctcctcccctgaaccactgcacaaacacaatgagtattactcaacaggtgatttgaccattccccccaaaaaatatttcctatgaattgtaacaaaaaggtatttacaaaatgtgattttgctacctctaattttaacatatcaggcacttcagaacatctaaaaagaagagacatttcaaaaaagcttagcattgtcaactatatacacagtagtgaggaataaaatgcacacaaaacaatggatagaatatgaaaatgtcttctaaatatgaccagtctagcatagaaccttcttctcttccttctcaggtcttccagctccatgtcatctaacccacttaacaaacgtgaacgtatcgcttccagaggccgtcttaacaattccatttccaaaagtcatctccagaagacatgtattttctacgatttcttttaaacaaatgagaatttacaagatgtgtaactttctaactcttttatcataactcgacaacctctttccatctagaagggctagatgtgacaaatgttttctattaaaaggttggggtggagttgagagcagctttttcatattatatacacaggccttccataaacggccagtaaatcttcccagagggtggtgggcatttccaactggccaaacgtggcctgtcattctaccatttctctcttccgacagcaaagtctggtagaatgaagaccaaccgcccgatggccgctaaccgttccacccgtcgttgttcgggacttcgctcacctttcaggccccttaaggcctttgtccgttgtcgtcaggactaggtaggtctcgcccaatggcgacagagtggtcacccgggaaccggatctgcgcggctccgtggccgaaagaggcggccaagcctgcttgcgtccctaggccgccttccgggccgtccacgccttaatggcctccgccgcgcggcgttcgagcggccgccatacttcccggcccaccacgcccggcgccgcccaaaggcgctgcgtcctggcggctctgcgggggtttcgtcgaggcccagcaggcttgggtcgggagacccgggtgccggcgggggccgggctgggagacgccacggccgccatcagtcaccgaggtggggtgggaaagagaggttcgctgcggcttcaaggtctgagcacagccagtgggcagccacagcagaggcctccggtgtctgcagggcagagggctcggcctgtcccgaggccccccagttcatccgccggcccggggccagagggccctgaaggcgcgggctgcgttctgcgtctctccgcgatctctgccggaccggaactaagaccagaccattttcttctggaaaaatcagaaatttgtattgatgaaaaaaaaaagttgttcttggccaaaaacatcaatcagcctcatctccagagtgatcctccaaactcagggagaattgtcatcctccttagccacctctgatgagtgcattgaagaggatgacctgct

SEQ ID NO: 209 - DNA, 544 bp, Homo sapiens
agtgaagaaatggaggcccagagtcacttagaagatgctcgaaggtgcacagctgctaagtggtggtgctgggatttgtcctcaggtcctcaagagtcctgactcttatgtgctggctccccacggaggcgtggagtcttgtttgctgggcatttgacagaaatgtttctgctcatcttctgccacagtgactcggggatagctgccctgatgccaaggcgattgtcttctggaagcagccacgccgtgtgaggttcctcatcactgccctgcatctccctgcgagctctcggggataattgcaaaatcacgtttgattccaggggagcagaaagcagcaggagccgtgaattctccaactcttaactggtcctcgactggagccacttttccctgcccacccatccctgtggcggattcattacagttatccaaagccggttttaactttgctccccctggctcagaagtctgtcagtgggtcctgagcggcttcaccattcaagtttattcctatcagcctggaatacaatgctctatctgg

SEQ ID NO: 210 - DNA, 504 bp, Homo sapiens
aatcacacggggcccaaatataatcacggggcccgggcccggcgtgggggttgtaggccggcgccacagcctgaggacaccgcgacctctgccccgcggagcgcgccgaatgccgggaaactttgcggaatgtgtccaggtgttgaagctcttgatggcgaaaggaacagcaagaggaccttgtgcatgaataatttgtttccatactacagaaagaatcccagacttcttagagaacccagtgactttttgcaccttaaatctgtgaaatcctcatgttttcttctgccgtatccatagttcaaacaaagatgaggcaaagctagacgcattcctgaaggaacccaagaaattcctctctttctctctctggaatgaaatgaattctctagaccaccagttctaaccttcaaaaaccaaacctgtttgtgagctgtccttcaaatactactgtagaccccagtgtttattcattaaattttttaaatatttgttttatttgga

SEQ ID NO: 211 - DNA, 594 bp, Homo sapiens
gatctcagatacctggaaccactgacttttgaacttttcattacttgaaataaatgttcttgttgcttagccacttttaggtgatatattacgttctggtgaaagcattcttcctaatacaagctgagagcttacagctaggagacaacctccaggagcagagatcacacactctcgggcagaaaaacagcttctgtattcttccctgtttaccattctggcatcaatttcaagtgctcagtccctcaagctctttcctctttacaaaagcccggctactgcaacaaagcatcctgtctgctgtaagtttcaagagactctttgaaactactgaccatctttctcactgcattcatgctgcaacaacccaaatcctgcaaagctctgactgaatcaggaaaaagtgaccttggtagctagtctccaaagatggccaccaccaatacttgccttcctgcgatatatatcatactccttgtatcaggaagagaagtgtaattccctccccatgaatctaggctggccttagtgactttcttggccaatagaatatagcagaaggcacattctgggatttgtaagactaggtcgcag

SEQ ID NO: 212 - DNA, 6166 bp, Homo sapiens
aagttaactgatttattgagggaggaggagagagttgaccaaagtctacatgcatagacagtcctaaaagcgtatctcaaacatgaagatgtaaatttgagagttaatgatacaaatttcagcaaaaacattttacaggcagagagtgttttggtgtttataaaagctgaactccttttgaagggcttttgtacaaatacacatgctcatatactatatgcatatataggtgtacttcattttgagaaagtccagtataatactagcatcaaatttacaaaacaggtttagtgttgactgactgaagaactcactacaggttttacttcaactgcttacattcaaaagtattcaatttacaaattttaggtacttactgtgtaaggtaagtacatctatacataaatacttttatgcaggtataatataaacatagcaaatagctgaggctattttctaaggtgtttggcttagtgaaccttttttacatctttatagttttaaagtcaaatacatagcagtctttatttgggtgtatgttatcacagaggaataaaaatcagtaatgggactgggaacagtatacccactaagttaaattaagtcattggttaaaacaccaaattattcaaaaccatttaagagatatgccccactaaattccctctgaatttagtcatttacagatgttgtgtttcgtattcctgttctcacctttgtgcctgctcctttgcaaacattcttttcacaccaaattcttagaactgaatcagaactgcagaaaatccaacaccttttctctcctctgcacatggctacaaaaattctaatagtaacaagatagtgtgaaagacatacctctatatactttttactagcattgcatttgcaaacttacttgaaattacttttttaaaaaaacaggatttctatggcgtcctgtccttcagggttccttctaaggtatgaattgctaagaattttcttttcagctgcctatatttcatcagccttgataattaatcatcttttatactaaatttgccatatactgacaaagtcaaagacctgtaataaactagacaagcaaaaactttctcttagcgggactaatgctgttaaaggcaaatggtttcctttccattaaaaccatattcctgcctgttaagttactgaggtaactccaaaaaattaagcagtaaaaaagatctccatgggatgtgccctaacacaaattctactcggcctactcaaccagcaccgtaatttttaacattcacttagcacctatgggtaattaaacaggcatcatcggagaatattccagttgctaaatggtaccccattattaattagtactatgccatggctctctctgagtatttctctgctcagttctagtaatatcttagcagtgataaaagtgttttgcccaaatagttattctcattttgtttcactttgattgaaacaaacatttgattttctttcatcatgtgctgtcatacggtgatatggattcaataacttaatcataatgaccccccaagattaagaagaaaaaaagcatcattcagcatctctcctctaccttttaatttctgtgttaagagggaaacaaaaccttcaaaggagcaagccaagtagcttttcctcttctctaaactttactggaaataaggcattagaggtgattagtgctaatctcacttctgttctctcctttactccttgacatcactgtgttctacatgcagtcctccaggtcacctgcttcaaaaccatcagttcattcaaaacaaagatttactggaccctctctcaaaggtactgattcaaaatctcaggaggaaagtaatgaaggtctacatttttaaaaataagcttcccaagtgaaggttactcaccaataagcttaagaaccactaccctatatatcatacaaaatagctgcccaatgttataattttagttgtccgatatcagaatgtcagcagaggattagggcaaatcagctaagcatggtggctcacgcctgtaatcccagcactttgggaagccaaggcaagaggattacttgaggccaggagttaagagagcagcccgggcaacacagcaagaccctgtctctacaaaaaaaatttaaaaattagcttagtgcactagtagtgcagtcccagctacctgagaggctgaggcaggaggatcacttgactccaggagttggaggttacagtgagctattgtgtgcctggacagcagagcaaaaccctgtctcttaaaaaaaaaaaaaaaaaaaagattaggataaataagttttaagagagagtctatcaccaacgatctgagtgagttacattaaaaacctgtatgaagaaaaaagtatatgagatgacagcactctggaaaaagtgcatctgtaaaaccaaacgtttggactacatagtatttaagatccattccagctccaaaatcctgacttcgtttttgtctcctcatactgacagtggatgaaatgcaaatacatgtttgcattccagggaataagaggttccaaagctacctctagtcttgtcagatggcccataaaaacatgctctgttgatctgattttaacaactctaaaataaaatcctatgctacacatattcctaagtccctgttcacaaccggtcattctccaatcttgccttggtacttattctgctgtaactgtacttatattccagaacaagaaatagctttgctaaacaaagattagactaacatatgctattacctatagtttaatgtgttaaggaataaacggcagacataagttgagtattcaggctgagggcttctttccaccaccacaagctaagctccatgaaggcagggaattttgtttacctagtacctagcacctagctcagtgtctgatgcgtatttggcaatcaatgaatatttgctaagtgcataaatgaatgagtggatgtcatgaaccaagttctttttcagatacctatattattctactacataccttaaagtaaaggctcactcaaagaaaaagtgtatggcttttgactgcaaagacttgaagggcctcaacggtgttgatactgtttaaaaataaagtatacaaccctcatcaaagagggttttctagtactcagtatctcaaaatttcttcagggattccagaaaaaaaatggacacgtgagcaattcaaacttttgtctccaagaagattggtatgcttataaattgactcactctttgtttccatattgctacatatgctcaaacctaattccactcctggcttttaagatctggcctctcctgtactctccccaagacatttgggctcataattttgtatgaatggagggctaacctagttagaaagtaaacttcagtccgttcaattaaaacacaaaacaaaacaaaacaaaaaacagccgggcacagtggcttacgcctataatcccaacactttgggaggccaaggtgggaggactgcttgaacccaggagtttgagagaccaacctgggcaatgcagggagaccccatctctacacaaaatttaaaaattagctgggagtggtggcacacacctgtagtcccagctactcaggaggctgaggaaggaggattgcttgagcccagaagacggaggctgcagtgagctgcgaccatgccattacattccagcctgggcaagagcaagaccttatctaaaaaaataaaaaataaaaataaataaataaaataaataaaataaatcaggacacccctccaaaaaatggtatctcaaaattaaatagcaaaaaaaaaaaaaaaaaaaagtacttggatatcacactggttttgattagttatataactgttactacctctaacaatgtagttaaaattagctctcgtggctgtgggttaaaaacctacttaaaaattaaaatcctgtcagaaacggtggtgcacgcctagtctcagctactcaggaggctgaagtgagaagatcactcgagccctggactttgaggctgtaacacacaattatcacgcctgtgaacagccactgcactccagcctgagcaccacagcaagacctcatctttttgaaaacaaattactattctatttacattgacaaataaatgatcaactttaagggcttgacatttttaaaaaaccccaattttaaacactatggtttgggatgagtaacttccaatatttgagtacatactatgtgaaaggcactacgctatgtatcaaagatccaaagcttaagtaaataacactaactgaccaagacacacaaggtaaaacagacacagccgcaactaaccctataacatgtgacaccatgaaggtgtcataaatagaggcataaacaaggcactcccacatcacaactagagtggcaatgcatttcagtagagggcatggagaggggagttccacaagagtactgacattttaattgagatctcatagaatgaatggaagaaaataagggcattctgtgcagtgataagaccatgagcaaatccatccaattctgggagcctgttctctatgtaccaggtgctacacatacaaagatggaagctagaccgcgccctcaagaaactcagtcacacgggggaagaaatgaaccaactgtaatgtactggtctgacaaacaaggaatagattagcactctcaagcatgctcatgacatgttgtggttttggtatgactccatcaaaggatccagtgatgtctcaaccataagcaaataacccaatccaatgccacaaaagtcagtaacagagttgcaaaagattagactgctttcctggaggtagcatacaaactcagttttgacacatcagtaggaaactggagatgcccaggaggggcagaaaaaggaatgaaaatacacgacatattcagaaacagcagatgtctgaacactaaaaacaaagaatatgcaatagactgtaagtgccctttgcagaaaaagtttgaccatgactagaagattcttgtgtgtctgggagctttagtacacagcaaagcagtgacaagagatgtggccaaaaattttggctggggttgaattctgaaaactcttgaatagcaggtaaatgccagactcaccctcctttgaagaatttcaacactaaacaggactgaggggaaaaaataaatcaaggactttacatttaagtagcatttattggtaacataatttgagtcaggacttagttattaaatcctcacaatcctgagggttaattatcatccagtgttataaaaaagaaaaaagttcagataagtcacttgccctcaaaacacacaattatgaaagtatcagaactgggattttaagagtctagattcataagttactactccttccattacaaaacaacacctgtctctgtggtgaagtataattttttaaagtcaattgttttgaaatagcaaaataataacaataataaaggaaatgcactcaatttcttaagcatgtttcatcccccactggatatatatcctcagcctaagctcattacttatgaatgtgttcactttcagtcacttcaagccacagaaaaagtttagaaaacagataatcagtaaaaagtggtagttgtgagaactcccagctgacagtgagcccatattaatgtctacacacttgtatatgctccacactgattcatttggggcaagaataataagattgatgaattaactcataaaaacatctaccagcaggctgggcatggtggctcacgcctgtaatcccagcactttgggaggccgaggcgggcgggtcacaagatcaggagatgagaccatcctggctaacacggtgaaactcttgtctctactaaaaatacaaaaaattagccgggcatggtggcggacgcctgtagtcccagctaatttttgcatttttagtagacacagggtttcaccatgttggccaggctggtcttgaactcctgacctcaggtgatctgcccacctccgcctcccaaaatgctgggattacaagcatgagctactgcacctggtcagaaacagctattttaatagtgtcatctttaagaaagaaaaagttaagcggcaaaaatatgcttctgtatttagaaccatggacctttaattataactct

SEQ ID NO: 213 - DNA, 1605 bp, Homo sapiens
gtgacgcagtgttgtcgtctcgtaggcttgaaagattggatacaatcagtgatgcacatttaccagacagaggatgtgcagcgtttactgttgatttctctcttttcctccctatcacctcagtttagttccaggatccacactcctccaccatagtcaggagattcagggaaagttggcagggttcagctttcaagttgacccttgatgaaccatggtcaatcctgttaagaggcgtgaaagccaatcccagccaatgagactggggagaaatcactgaagaacttgtggaaaacagaccctctggataaaagacacgtgtggggaaaaaggggctttttaatgttattctggatgtttcccaaaagtactgctgctgccttgcctccctgacagacactggccttaggatgacatgcggcaggaaggaaggacggatctggggtttttcaagactcactgagatgcacaaggaaccaaccctcaagtagccaactcgttcctgtttgcatgtgtcgactgaaaagaatcaaaataaacaaaatataactatttctaagaggttacaacttgcaggcaggaagcaggcctctacctgaggccataaagcatactttgaaggagaaaaggtaggtatttatgctaggtggagaggtaggatatacgtattctgtagcatacaggagaagcctatgaaaattcatggaggaaactcgttagagacacgcactgggcttacatatgaagaatatccaaaagcggatgacctgtgttcactctggggtgaagatttaacatttaaatgtattataattaggctgtaaatgcaaaaaggtgaaacatagggcacaagttcacgatctgtgcaatctccagagaccagtctgatctagcctgcagctggcagtcatctgtcaagaaggggctctttgtagcccagagtagctgtcaggttggaaccataaaaccaaaaggagggcatcggcggttaggtgaagaaaagaagtcttttggccttttttcctcttcaagtcagcttttgataagatctagtaataataaggggatgggtgtggctgcaggtgggacatgtcggttctctgtcctgtcacagctaagaactaagaactttagagtctttcagccatagagggtcctgtcatccattgaagggatcagtccattgggattttgccagttttagcattgatgctgtgtcctgggaaacccctgaatacttatcatagcagaagttcagccactgtagccctacctcaggaccgcttttatgggaaagaataattcctttaactgcttgagccatttgagttgtggctgcttttggtacttgtaataaattgaaagcatcttgaatgttctgggacagtaaaagaatgtgcctttgtttctgacagcaattataaaatcaattatatgtttatattctaaaaaatgttttgagtaatgctgacatcattggaaaagtgcatcacttagaaaatgtatctgtgtgtcaattttgtttgttcaaaatcagtttcattaatttgtgggaagatacaccttgtacattttacctaattaaaaaaaatattgccagttgag

SEQ ID NO: 214 - DNA, 1717 bp, Homo sapiens
cctagattcccaatagttttagtgctatgagcatacaattttgacattcagtccctcagaactacacacattctaattttggtagtatgaataatctctcctatgtgataagttatttaaccttctaatatttcttagaatcgaaaagaacaaatgagctgcagcaaagaatggcaaataacttttatgcttaacacaatttaataacctgaaatgaagtaagtatgtgctatgtttccattaaaaagtttccagccacaattaattgaacgaaaacttgtcttgttccaagattattcttggaaatgtaattttaaaatctgcttgaaatgaggaaacttacttttttataccatatgaaagcaatttcattttttaggaatgatttttggatagacttccgattggatattttccattggaactagcagcatagggggtcgggaggggggaggggagggaagcaattctgtgttcttttgccagcactgacaaaggtctggttgtcagtgatacctttacagctaaatttactccagagtgacagaaacaggtgcacctcggcctgccagacacttgtgcagagagatcacgcatctcacggcttgacgatcaagggggcaaagcctcggtcttcatagaaaaggagaggaggcaaacgcagcccaaactggggggtttctcttcaaagccagctggtctggctttattctacaggaatttttttacctgtcagggtttggacaacaaagccctcagcaggtgctgacgggtacaacttcctggagaagcagaaaggcactgagaaaacatcttgctctgttgctcaggctggagcgcaatggtgccatcgtagcttactgtaaccttgaacgtctgtgctcaagcaatcttcctgcctcagcctcctgagtagctgggactacaggtatgcatcacaatgcccagcgaattaaaaacaacctttttttttttttttttaagagatggggtctcactctgtcacctaaattggagagcagtggcactgtcatagctcactgtggccttgaagttctgggctgaagcaatccttctgcctcagcttcctgagtggctgggactacaggcatgaaccactacattcggctaattttaatttttttttgtagagacagggtcttgttctattgtccaagctggtcttgaattcctgacctcaagcaatcctcctgcctctgcctcccaaagcactgggattattacaggtatgagccaccgcactgggccgtcatgcttactcttcggagagagaagtgaagtatctgaacgcctcagcctgagaatgggtcatttgcaaagtaaataaaggcaatgccaaacgtcagtacaacaagcaattgaacagaatgattgcaaactgctaatgaaggagaaggcaaggtgcggttaggatgaactgtagaaggacccgtcccctagagctcattgagcatccaccctgctgtccggctgtcctctccatagggggctcgatggtctttgccgacttgaggaaataggtcactgtattgcagcagatccttggtcgtggggctgggttggtcattgccactattttatgggatggggaatttggaagattatgaagtgtcagctggttgcccttggacatgcagtgagagggaggattctgttttgctggaatttatagtttttctttctttctttttttttt

SEQ ID NO: 215 - DNA, 454 bp, Homo sapiens
cccaaatcctcttctagaagcacctggcaggggctctgcctgagctcacaactccaacaaggtcaatgtacaccaatcggattggagggactgaggagtgggcaatcctgcccaggagggagagcatgggacaaccagttcacggtgactttatgagctgtaaggctcacggcgaaggtctgcagcttcacttcggaagccagcgagaccaccaacccccctggagaaaggaacaagtccagaagcaccaccttaagagttgtagcactcacggcaaatgtctgcagcttcattcctgagccagcaagaccacgaaccccccagaaagaacaaacgcccaccaccagaaggaacaaactctggacacgccgcgaggcgtgtaactgtaacacacaccgcgagggtctgtggctttattctttaagtcagtgagaccaagaacccaccatttctg

SEQ ID NO: 216 - DNA, 323 bp, Homo sapiens; identical to SEQ ID NO: 150

SEQ ID NO: 217 - DNA, 6637 bp, Homo sapiens
aaaatgtacatcgtcaatcacaaacacatattctaaggaattgaattttatagagataattgaatgctttcatctgtaaaagaattagtggcctgcaaaccactgtggattcttgctatgctttgaagttgtcagtgggggaatttgctgctgcaagttacttagacttgtaggcaaagggaaattcaaatttttaattctaaaatgaaaaccactgacaaaattttatactctgaaagtttggttgttagcttagtcattattttcctgttctttatcatttcggaattcagatgcttaaatttaacatacaaattatttgttggtaaaacataaaacataaaaagctacatttggtaaactaaattttaggattcaaagtctctaacaatttctatgtgacatgtcatacggtgcagtttttatttgccaaagtgtctacttcatactgcctatgcactgcttcccgtttttaatctctctaccccaacccccctataattaaataaacccctagaaaactgccttcttttagaatacctaattgattactttaaatattttttcagaatcaaaattacaaaagggagagatacctaagaatctggcttgtttatattctttaaaagatcgcatttgattgaaggttactgtactggtttgccagcaaacaatggaaaatgtggagaagctgaagaatgctcaagctgggacttaatagagtggcctatttggtttgaaatgttttaacttacagagcattgagtagaagcctaatctaatatacataaggaagacaaaagcaaaggattgtgttttctatctaaaggttaatcattgtggttgctcctggccattatcacatgactggaagttaacactctccaaacgctgagcctatcctgtacagcactagaaagtagaaagaatcactcaattcagggaaaccgttttctcttaatgtgaacatttacattaatgccatttccaaaacctttctgggacttcttaaatgcaaagatgctatctgctttacttcatgctgcctgtttttaggagcttggagtgctttaggaagcttcccaatactggtttagcagtaatttggttgactgatcaaggcatgttttaactttgacactgaaattttaaaaagacaacagttatcttgcccggagagtcaagtttctgcttccaaggaggtcaggaattgttctctttggtgatgtggctgtgcttggtagcccttgaaagtggagtcgacagcagtcctcagcttttgtgtgcctgtcttagtctgttttgtgttactataacaggatagctgaggcagggtcacttatgaaggatgctcacagttctacaggctgggaagttcaagggcatggccctggcttttggcaagggctttgctgctgcttcatagcttgatggagaaggtcagaggggaagcagacgtgcaaacaacccacttgttcacaacaaccaaacaagtctctttttaacaacccactcctggggactaatctagtcttgagagagtgagaactcattgcaagagcagcaccaagccattcatgaagcatctgcctcagtgaaccaaacatctcccactaggccccagctctcaacaccaccacaatgaagataaaatctcatcatacatttgagggacagtttgggagacagaccatagcagtgctcagtatttctacccaaatgttcaggtaacttaatatatttttccttgaatatatgtttaaatgggcttcccttccccacgctcatcttgaatggtcccacaacaacttttgattatcacgttcctgtaaatacacaaaaatattttgtggtcttttactggcagcccagtggatgggactttaaaaaatcacccagattccaacaaccagagaaaacgactggtgtatattttttccagtctttatttgtatgtctgtgtatattcaatggaaaatgtttgaagcttcactcacagcacattccattagagaaagctactaaaatcataaggaaaatctaaaatgcagtaagccagtcagcaagccataatgggcatatgaaaacaaagttttttgccatgatttgtggaccacagaagatctgtgttattagtctatttaagtttggtgtttgaaattaaaaatgttcgacatactttttatgttttttttaaatatactgtctatatttaaaattgagtatactgtactttagtgtgtttggaagcagatatccccaaataaaagtatacagtagaaccaaagaattttattgatcagctagaatttagttttcaggtgtaataactgtcaacctaaataacagaggctttctaaaagaaaatgatgtttatttgggaatagggcattgtgaaggcaatatgcatgccatagtaaactgtgtgtattcaggaaggtaaaggaagacaggtttttaaaggacagataaagattatataattgtcttgaaataattattcttggctacaaggattaataacaaggatgctgccagttcgggtttggacaatcggcttctaggcagatgtcccaaaagtattttctgtgtaaggttgcgaatagtgtttgtgcaagctggcgtggtttcttctgggtctttgaggtagtgcgtaaaatccctctcttcatggacttccctggctccatttgtcagggcttttggaaacatgactcttgattctgacagctttcacctttccctctcttgatgaagatgtttttccgaaagtatctatgatgaatcatcttgtagttaggctttgattgtcccttggtgacagaatagacctttcccgggttattggtctggtcctgcatcctgcattggcaggagtgattggcaactaaaagtcagtgttaaaacccttttagccacctttgagggcagggaggctttaagggagtggcacttaggctaagtccacctggagtctattattaagtccaattttttttccttagtcctttgttgtcccctcaaagtgctgggctagcattattctgttaggaattgtacttctttctgcagaaaatttggcaaataacagatacaaagtttaaaaaggaaatacacaaaattaatagtaatgtgacaatcccagtttgcataatggttttgagccctgaacctaggcttacaggcaaccaattgaataaatcaaattgtaatacaattcttgctctgatgtcttaggaaaaatgtctacagcctgaaatcatcaactttttgtcctggtttgcagtttgaatgtctctagctatggcattggttggtatggtgaacttttgtgtgacccatacatcagcatgagacttgctcctttaaaaattaatcacatcttagcttataggcctcagagcatgggagtagttttttttcttagagagtcatagccaaatattgaaggaaattaggaggattcaggagcaaatccagtctgcaggtggataacaggagtttcaaaacggtacagagctgtgatctaataacaggtacatatagctttcttcagaaacttaaagttaccctgatttttaccaaagatgttcagaataaaacagatttgtaaactttatcagattttgtctgcaagaatagtagtatggtcacagtaatctcagatttaaaaacctccttgaggctaagaagctaagtcaaggtagactttagattttacctatagttttaaggttcctgggcctgccaggaaatgataatttttaattcagtgtaatgctgagaaccattgaagccaggcattctacacattctcaaatatgacattttaatcaaagccttggtaatacaaccagtgtttccaattgtatcctgttataacgagagccgatttttattgaacttaggcaaatcatattgccttaagagtactcacaaataggctgggcacagtggctcatgcctgtaatcccagctctttgggaggccaagacaggtggaacacctgaggtcaggagtttgaaaccagcctggccaacatagtgaaacctccccccggccaccgtctctactaaaaaatacaaaaattagctgggtgtggtggtgcatgcctgtagtcccagctacttgggaggctgagacagaattgcttgaaccctggaggcagaagttgcactgaaacaagatcgtgccactgcattccagctggggcaacagagcgagactccgtctcaaaaacaaaaacaaatgaatactcaaaatagtttccaaattggagggatcaagaagaaaggaaaagcaaatatttctacctttgttcacaaaagtattccaaattgctgtaaactatagatagcatgagagaatttctttaaatatggaaaacaaaacatttaagtaaaaaaacaataatgcttcaaataaaagtcacagacacatcttcagttacttagtctcatgtaactttttttgttgtggttgatcttaattagtagttacatggactcatcagtttcttgaagttctgaaaaaatatttagtccattggtattaaagtgattagtaacctgtatttaaaagtgtgttagcatcttttccatgaatctgattgcaaatgcttttagagaaaaagcaataactgggaattacaaaaacttagaataaccatgattaaaaatctgatgagagtttaccataaccagaaatagacaaagagttttggttatttttgtggcaaacagcataatcagaattatgactgatgacatatttctaacggcatcgtacaattttggaacactcatatcaataacatactcataaatgtaactgtgtctagtattacatcattagacaatgcttttcatacaatttaatacatcaaagaagcctaattagctaacatctctaccagatggcatacacatgctctgaggctttccagaggcccaagtggaaaactcaaaggtaattttaagtcaaaaacacttaatttagaacttgagcctagagaagcctgtcaaagatgtcaaaagttcgaaacaggatcacaggtcactataaaatatttaacaagaatgataatcaaaagacttaagaagcaatgcagaaagttacatacatttaaaaaccatcttttcaaagcttcatttttcccaagcaaaaaaaaaacttaaacacaagaatttatcttgatagaacataaaatttttcttaggccagttgccaaaatggtaaagaaaaatctcttgcagtgtgactgcctttacttatgggaagcctatttggatatactgaaagttgaatctgatgaaaaggtacttgaatttaatcagacacaggaagagtatttccaaggttatgagtgtacgccttatagaggaatgtaaataagaaagctagtatgttgaacagaatacatggctcttggaaaaattacgagaaatttcctgcttgcgtggaacaattcaaacatgagaagagccaagaattcagaatcaagttatactggaggaaaacattgcttttctaggccttctacagaacatttcagtatcaagttataacagcaagagttagaaccagaggaaaaaagttacaggagctaatgaaaaagttaagagttatcacccctgccaaacaaaaagatgtaccttcttaaggggagaaagagctaaaggcaatgatgtgtgacctacaaataaggtgcagcaagatacagcaaaggttgaacttgtgagatataaatcaggatcttcaagaagaaaactctacctcaagaaatgaaatgaccatcttaaatgaaaaaagacagcctttctaacctgaatctaggggaaattaaacggatctcagaaggaaatatggcagaaatttaaactgtggtttagaagatggctgattttagaattaaaaattaaaacctctttcaattttattaagaccagatccttaaaaagaaccttgttctaacattggggaccaaattttgtgtgtgtgtgtgtgtgtgtgtgtgtgtgtgtgtgtgtgtgtgtatagtgcatgtatagcatttacactatcgtgtatatacaaatatatagcatatgtatagaatatactgtattattgtacatatacatatgtacaagtatatatgtaagctcaatgtcttatgatttcattctgacctattgccaacttcattacacacaactcctttcataaatgtatccttcatgaacatttcatgatctgcacagaccttcagtgacatgcttaaactttctgctttgttttatacttccccttaaacaactggtcatcctgctttaggataaaaagttactatgcaagactcatacagaattattctgttaattttgtaaccttccttaccaaaggtacattctcacacccattaacttccttcatatttctctcctcctcctacttagtggttcctttctgtcttgtttccatatttgaaacaacctctaataaactctgaatttaaacaacttttttcccaataaaaagcaatttttatgccttataacttttctcatcaaaacatctttttttgggtacactttgtatatggaattgtgtattttcaaattttaacttattaaccttaatttttagtgaaaaccta

SEQ ID NO: 218 - DNA, 1536 bp, Homo sapiens
ggctacgcaagaccttcagttccggattaggaggccccgccccccggcccgagggaggggcggagagacccgctcctgcgacttagggcgatgccaccttaaagggcttgacctcctcgaagccagaactgcggaagaggatggagaaagaaacgctagatagacccaggattcgaacccacaacagcttggatgcaaagctcattttgaattctgaagagctgggagtttagcagtggacgaccaaacaaaaaaataccagaagacggtgaaagcagcagctggaaatgagagaaaaattaagaaatagaaaatgctgtttcatgtattagggagtgcacatctttaaagagaagtgaagaacctttttggctaggcgctttctggggaccttggcagttatcaacaagtcactctgaaactaacagaaggtgaggagggagtaatccagaaaggaaactgccatttttgctagggcaagaaagtagacctagcaatgcaatgccatcaaggagttagctggctctagcgttctccgaactttgcaactcattttatattacattgtctgcgtcaagaaatttcaagtaaatgccttgagattttatatgtataaaatgtagtctctggccaggcggggtggctcacgcctgtaatcccagcactttgggaggctgaggcgagtagatcacgatgtcaggagatcaagaccatcctggctaacatggtgaaaccccgtctctactaaaaaatacaaaaaattagccgggcatgatggtgggcgcctgtagtcccagctactcgggaggctgagacaggagaatggtgtgaacccgggaggcagagcttgcagtgagccgagatcgcgccactgcactccagcctgggcgacagagcgagactccgtctcaaaaaaaaaaaaaaaaaaaaaagtctcagaagaagtgtcaagttgactaaatgatttttaagtcccttccactctactatatcacaataatttcccctattttaccttatttaattttcacaacaaccctgcagcctgtaagtaggtgactcctccatggtcagcaggtggtcagtggtcgaactatttaggactatctgatgctctttcctctgctcaccattgcaatacaatgagaaaaatgcaaatgaatctaagtacagtgttctctgggaatatgaagatagaactaaaaactgcctgagagatcagggcaggcttctagaaagttgtgtctaactagtcttgaggtttacataaaccacaccaggctgatgggactgggaagggcccactaagcagtgagaccattcccttttggagagtccttgcatcccctcccagatttcctctttgaggggaaggtgagagaggaggtaaaaggggtgaggaatggagaataactcattctggttcttgtttccccttttccacataaaagtatatttgtcttgtgttccatacaccagtccatactgatgtgatggtgttttttatgcttccttttgaataaacatttcattctt

SEQ ID NO: 219 - DNA, 716 bp, Homo sapiens
gtgtagaacccttttctcaggcaaaacctaacatctgaccgcaccctttttgctattaaaaaaaaaaaaaagcttctatttttttcctgctgtcgataagataaattctccagtagacaacctctcccactaattgtgtattagcaacgtattttatcttgagagcttgtacactgggctctcaacgtggtgtggaaggtagcctgttacagtgctggattcataaaagggcctttatggtttgtgaaagaatatctgtgtgcttagggaggaaactttttgatctgcagaaaagccagaagacatctaggacatccataaaaattcatcagagagcattttactactgagctgcaaaggtaggaaaaataaattttttttggttagaaaatatacttctttcatctgcgtttcaataatttattccccttgttagatatacatggaattgatattgcttattctgactaagtgaaaagtgttatttctacttactgctcaattagaaacatgtagtgtttaattgtcagtttgaatttttctttcatactattacagtttatattttactataggcagaatttcctctttatcctaaattttgatattctccataatttcatcgtgccttgacattgctgtatataatttctatacatcaggaaggcaattctgtgtgcatgtgtgtgtgtatatatatagttagaagttagaaa

SEQ ID NO: 220 - DNA, 276 bp, Homo sapiens
gggaggggagggggagggggaggggaggggaaggggggaagtaagggaagggaaaggaggagaagggggctgttgggatccggttcaaattaagttctcaagcgctggtggaaggtttagctacaggtcacggagaagatcagggaagcaacaggacacgtggggcaagggagcgtgaggcttaggagcaattagagggagacaaaaaggttctgctatccaccaaaccttcttcggtctgggccctcccttagcaaccctggggctttatactcc

SEQ ID NO: 221 - DNA, 1118 bp, Homo sapiens; identical to SEQ ID NO: 14

SEQ ID NO: 222 - DNA, 254 bp, Homo sapiens
ggaacagagaaattcactatggatgatgctatatctttatatgacctttggaatatctgtaatcatcctgagggcaatacttatgtaatgaagatggaagaagagagaatatgaatactccgtgcactttgatcttatcgtttagctgctgatcataccatccctggagtcctacttctgactccaagttatgaggatgtcccagtgttctcacgttccaccttcaatcacacttaaccaatgttaaatccctg

SEQ ID NO: 223 - DNA, 1936 bp, Homo sapiens
ggcttaacatcacacatttattttctctgttctggaggctgaaagtccaagactgaggctccagtcaattccatctcttgtgagggctctcttctcagcttgtggacggcagcctccttgctgtgtcctcacacagactttcctcagtgcatgcgtgtgggaagaaagtgagagggagaactctggtgtctgtcctcataagaacactaatcctgttgaatcagtgcccatcctcacgaacccatttcatcttagttacttccttagaggccccatctccaaatacagccacattagagtgaggtcttgaacatacaaatttgggggagacacccacattcagttcataacactaccatttctgaaattgcaatcccaatctccccaacactccttcacccccttaccttgctctcttccccccacagttcacctttctcgtactctccaatgaattcatattatgaattctattgtttattatctgtcaccctctcccccatctagaataaaactcaatgattaagggtaggagtctttgtctacttgttctttatgtgtcccaggcatctaggttagtgccttgtacacagttggtactcaagattagctgttgaatgaatgaaggagaaaaaacatctccttcctggccccttttcccttttcattctctttgcacatcaccagggaaggaaaagaaacacacctcaataatcaattagtttgaggagagctgtttcttcatctgaaaattgaaaacaacaagacatgcaaggtacagcatgaggtaatgtgctcagggtgctttcaacagctagacttgtatactagttccagctgcgcagctctctagctaggtgactttgaacaagcagtccaaccttctgagctcccattttctttcctgtaatagttggataaaatcacctcgtagtggcaagaatcaagagacttctcaaaagttaaacatagaggccaggcgcagtggctcacagctgtaattctaagcactttgggaggccgaggcaggtggatcacttgaggtctggagtttgaaacctgcctggccaacatggtgaaactctgtctcttccatctctactaaaaatacaaaaaaaaaaaaaaaaaatagccaggtgtggtggtggacacctgtagtcctagctactcgggaggctgaggcaggagaatcacatgaacctgggaggtagaggttacagtgtgctgagatcgcaccactgcactccagcctgggcaacagagcaagactccatctcaaaaaaaaaaaaaagataaacacaaaaattaccatatggtcgaacaatcctgctcctaggtatatatccaaaatcattgaaaacagatacacaaacacttatacatgaatgttcacagcggcaatgctcacaacagccaaaaggtggaaacagcccaaatgtctatcaacagatcagtaaacaaaattgcagtggatacatataatggaatattatgccacaaaaagaaagaaagtactgatacatgatgcaatggggaagaacatggaaaacataaagctaggtagaagcagccagatacaaaaggtcacatactgattccatttatacaaaatacccagaacaggccaggtgcaatggctcacgcctgtaataccagcactttgggaagacaaggcaggaggactgcttgagtccaggagtttgagaccagcccgggcaacatagcaagacctgtctctacaaaaaactttaaaaaatatctgggtgtggcagcacgtgcctgtagtctcagctcctcgagaggccaaggtgggaagattgcttgagcccaggaaatcgaggctgcagtgagccatgttcatgccactgtacttcagcctgggtaagagcaagactgtctcaaaaaaatagtaatacccagaattaattcacagaaa

SEQ ID NO: 224 - DNA, 2919 bp, Homo sapiens
actcacggtatttatttatacatacactttaaaaatcacgtattctaacactttgctgtttccttccaaagttttgaatagaattcagttgctccaagacacacattcatttacatgtgggttttttttctttactaaaatacatttacttttagtattctcaagtgcaaaagagagttgaatcttctattgcatatgaaatggagactagtcttccacaaagagtaaaatgaagttttgtaatggccatcatctgtaattgcttacaatgacagcataaactctaggattttgttttaacttcatggctacatgggtaaagttaggtttgaaaatcatttcaaaaacaaaatttatcaaacaaaaaacctggacaggtttttattttttatttttttgagatggagttttgctctgttgcccaggctgaggcaggagaattacttgaacctgggaagcagaggttgcagtgagccaagattgtgccactgcactccaacctggtgacagagtgagactccatcaaaaaaaaaaaaaaaaaaaaaaaaaaaagagaaaaaagagatagaattttggaaacccagagaggccataacagggaaaagaaaaagcaggccaggtgcggtggctcacacttgtaatcctagcactttgggaggccaaggtgggtagactgcctgagctcaggagttcgagaccagcctgggcaacaacagtgaaaccccatctctactaaaatacaaaaaattagctggtcatggcagcgtgtgcctgtaatcccagctactcaggaggctgagacaggagaatcacttgaacccgggaggtggaggttgcagtgagccgagattgtgccactgtactccagcctgggcaacagagcgagactccatctcaaaaaaaagaaaaagaagaaaaagaagaaaccgggtttctcaactccatgtcctgtgcttttctgactctgcaagagccaagaggtgtcttcctaggatggtcacagggaggtaattcccccagcatggagggtctgagtcaagggtaagctctgtgcaaggtgtatggcggggcgggagaaggttaccttgcccataaccttgctgcttactccggtgagaaaagagaagcaatcagaagagcatgtccacctgctcccctcactgcctctgcctacccacccgcctacctatctacatttgccaagtactccgccagccctctccctatgatctgccgtgtttctgtaggcctgagctctacatatgcactacatcccattccctttggctagccgtagtttaaaagtatgtccacaaattccttctgaagttgccaaatctaacaaataaaaatacaggtcatacattaactttgagtttcagataaagtcattatttagtgtaagaattccctatgcaatatttggaatacacctatactaataagcctttgtttatctttatttggatgtctggccaccctactttgtacttagtgactcccttctaacaaatcagagtaagggatgacatgcaacttctaatactaggtcacaaaagacactgtggttcccatcttagtctcttgctctcttggatggcttgctctgggggaagtcagccatgctgtgaggacattcaagcagccctgtggagaggccatgtggcaaggaacaatggccgcctgccaaaagccatgtgtggaagcttggaagagggttcttctagccccggacaagcttttagatgactgtaccctcaggaggaacttggacagaatcaccctgctaagctggattcctgatcgactgaaactgtgagctaacttgcttttaatttttaaacctctaagtagtgggtagtttgttatgcagcgacagagcaccaccacacggacttcctgacatcactccaggagctgccctctgtctggcatcatcgctttcagtctttcctgatcattcccaggggcacacagacaggctataatatctaccctcttaaagaaagctctctcttgatctcagatgtcctattttctgttcccctgtatcagctgttgtgcataatcgctatttctgattccttttccccattctctcctcaactattccaattaggcttttcagcattcccagcccctctcaaacagctgcagtcaaaacatttaatacccctcttgtattaaagccagagttcaatcttcaggcttcatcaaacttgacctaattattcatctaataaatattgataagtagctacgaggtgccagacattgttctagatgctggatacacagcaatgagcaaaacgcatccaaacccacatccctacccttactaggctgctatggaagggagtggggctggcgaatcaaccataaacaagtaagccactatgaagatttatgaatgaaacaataggacgtctggggatcaaatatttcaaaataatgggacaatgggtagaagtgaggatgaaacagggtcagctactgttgactactgaagcaggtgctgggaatatggaagcacattaaatttgtctctactttggtatatgttagacattgtccatagtagtctttttaaaaagcacattgcatatcatctcatctgcaatccaggagatggggtgtgacaatctaaatagcgtggtcatgacctcatggggtgggtgagagagtgacaggagatggctggggaagagcattccatgcagagggaatcacaactacaaaggccttggcttaagagaatgcctgagtgttctagaaatgacagggaggccagcatgcagaggacgagcggacggaggggagagcactggacaggccagccggggccacgtggtgccttgtgggctgctatggggacatggactgttactctgagtaagaacatgaaccacagggtgtttc

SEQ ID NO: 225 - DNA, 239 bp, Homo sapiens
attttttgtatagatggggtcctcttatgttgcccaggctggtctcaaattcctaggctcaagtgattccgcccacctctgcctcccaaagtgctgggattacgggcatgagccagcgcatctggccaccttattttctattactggctcaatgtaatggctccatctcaggaacagccaatgaaagagatgcacaggacaagagatgggacctcagtatgttgccgcggctgaccttg

SEQ ID NO: 226 - DNA, 396 bp, Homo sapiens
gtcagcggctcagagcgcggctgtgtggggctgcggggctcccgccatgcccgctggggtaggtcctgcggaccccggccactggagccactcatcatttccgacggatgggccggaggggccgccggccgccccagccagggtctcggtagcctgcaaggagagaaagaggtgggagcagcccgcgcggggccctgcgtcttgcataggcgcttctgggcgcggaattggaagcagtcgtcacccggaggcctgggcgtgcaagcaccgaagctctggctggccctgagcctccccaccccacccgctcttttcgctggaacgcgtgtactttgggcagttgctgacgtggagacaggacgtatgtcttcatattttagtaaaacccaatgccct

SEQ ID NO: 227 - DNA, 376 bp, Homo sapiens; identical to SEQ ID NO: 166

SEQ ID NO: 228 - DNA, 353 bp, Homo sapiens
tgtaagtccaattaaatctctttcttttgtaaattgcccagtcttgggtatgtctttatcagcagcatgaaaacagactaatataatgaatgtcccgggatggtagattccaaactgtgctccttgaaacccctaggactttagatttaaatcagatccatgaagtggcccaagaggatcttcagaaacttaggagggagtttaaagctgtggatagaacacagggttactgatgattacacttggctattgctgtcatttggttcttttgatcttcactttgagtcaatggaactgttcaggcattctgtaaggaggacagacaccagcgtgacactgcctcagcatttctt

SEQ ID NO: 229 - DNA, 316 bp, Homo sapiens; identical to SEQ ID NO: 188

SEQ ID NO: 230 - DNA, 378 bp, Homo sapiens
tactttgaaaatacatatttcacattataatagaatttcataatttagaaatgaaaagtacatcactctaattatatttctcttgatgaaagtaaaatttgacaagttatctctgctgacaagaatctgcatcagtgaatctgcaaagagggcaccagttaggggtggggcctcatcttcctagatggctcaggtctagagcctgttggctggtcagacataacatttttatgtttatcaaataggaaaatgattttttaaggaccatctgggcacaggtaacaggagatgcttgtatctctcctgtagggtcagtcttcaggagacggagctgagacaggagtcctactggcaaggctattctgtgctccatgtgtg

SEQ ID NO: 231 - DNA, 304 bp, Homo sapiens
aagatattctaggccccttgttgcttcagccatcagtctataaataacacaacactaattttccatcaagtaacagcttaaaacagaacactgtcaagattttgatttactaatttataatcttatttccaagcaaaacaagtcaatttcatgttacaacttttttcttgtttctttttatcttgtttggcctgagggttgggggatttgggggagttgtcagctgcacaatctttgaagtgtaagttaatttttatgtgatatttcagtatatattttattgattaaatttattggaaaactt

SEQ ID NO: 232 - DNA, 1060 bp, Homo sapiens
cccgagtagctgggattacaggtgcccgccacagcgcccggctaatttttgtatttttagtagagacagtgtttcaccatcttggctgttacacgcctccgtataagagaccacctgagcaggcttagtggagcaacaaggctgtttattcacttgggtgcaagtgggctgagtcagagaaaggagtcagcgaagggtggtgggagtggaactggttctataggtttggggtaggtagtggaaagttacagttaggggcagtttttttgggcaggggaagaatgttacaaggtgcatagtcacaaggtgggggaagtcataaggcacgatatcacaaggtggatggattagttggggaagggcaggaacatatcacaaggtggatggattaattagggtagggaaggaacatatcacaaggtggatggattagttagggtagggcaggaacatgtcacagtggtggatggattagttggggaagggcaggaacatatcacaaggtggatggattagttagggtagggaaggaacatatcacaaggtggatggattagttagggtagggcaggaacatgtcacagtggtggatggattagttagggtagggcaggaacatgtcacaaggtggatggattagttagggtagggcaggaacatgtcacaaggtggatggattagttggggaagggcaggaacaatcacaaggtggatggattagttggggaagggcaggaacatatcacaaggtggatggattagttggggaagggcaggaacatgtcacaatggtggatggattagttggggaagggcaggaacatgtcacaatggtggatggattagttggggaagggcaggaacatatcacaaggtggatggattagttagggtagggcaggaacatgtcacagtggtggatggattagttgaggaagggcaggaacatgccacaaggtggatggattagttggggaagggcaggaacatatcacaaggtggatggattagttggggaagggcaggaacatatcacaaggtggatggattagttagggta

SEQ ID NO: 233 - DNA, 2022 bp, Homo sapiens
actaaatttgtactgggcgctggcgaagggcctggctccgccacgcgcggccctctcgaactgcccgtgggtacggcgcgcgctgctgccctgtgtggcctgtgcggggaacccgagggccgaagtgggccccgccgcagcacagggggacaagagaaccaggagcgggctgcctgggggcagattcgaacccgtgctcccagcggatagaagtagcacttggggactcctaaaatattcagcccaatcctgattccagctgccctctctaggcacctttcctctacccttcttccagtttacaattctggtgagtagatgtttctctatctcttctcttccaactcctgcgcccagagccaggaggacttctggagcccgcccagcaagaccctctctctcccatcttctgctcaagggctcgaggtctcagtggacagagctgaagaaaagccgtctatggagcctgcgccaggcgcagactgggtcgtcgcagtctgggtcgtcgcagtctgggccggggcgctggaagtcttactcacttctcaagaacccgcaagggatcaggcctgaccctttgcaagtgacagaatccaaagctttgagctcatgggaaagtggctggaaagaaggtcactgtagggccgcacaggtctctggcgaggctacccaagaacatttaaatccctgcccagagaagaagaggctccagctgtcctgcaccttcctgggaactggcagtccctccgcgcaggggttctgcagcgaccggcagcgcgaggagacaaggatggtggccagttaacagaaaatcaaggcagcgggaaagggaggaatggcctacaggggccatgcaggggctgcatggaggaattggtcagtacacacagaagtggatggcactgggccaggcacagtggctcacacctgtaatcccagcactttgggaagctgaggtgggtggatcgcctgagcccaggagttcgagaccagtcaagacaacatgacaaaactccacgtctactaaaaatacaaaaactagctgggcatggtggcatgtgcctgtaatcccagctacttgggaggctgaggcaggagaatcgcttgaggtggaggttgcagtgagccaagatagtgcccctacactccagcctgggtgacagagtgagactttgtctcaaataaataaataaataagaagtggactgctgtggtgtgagaatgcacctgacagacctccaattatggagagcttacacagccaagggccccaactgctgctctctgaaactcatcctgcttttgtgctgaggccacacttcccacaggctgctccagccagtgaccaagcacagcatggacactaagacaggcccattctgggagacgtgggactcctctgatggccaactttgacttggggactccctgatggccttgccaaacctttttgataaagcactttggtctaggaagcttctacccgaccttccttcctctctccttcactcagggtcagacttataatgtgatctgacagttcccccagcatttcctggctctttctcctttcctttcacaggtgtttctcctgagaaaattcttgcatgtttaaacccaatttgagggattattgggaaaattattgggaccactattggaacagttgacaaactgtcactgggggtgtgtagattaaatgtcagtatcgtataaatccatgttaatttcctggtagtgatgacagcactgtgattatataggagtgtgtccttggtgtttgggaattacatggtgaaatgtttaggataatggggcaacttactttcaaacggttccccaaaaattctagatagatagatagatagatagacagacaggcaggcagagtgagaaagaaagtgagaatggtaaaacaaatatatataatgttttgtggggagaatgaataggagttttttgtagtattcttacgacttttccataagtttgaaattatcaaaaataaaaaatgtttaaaac

SEQ ID NO: 234 - DNA, 2428 bp, Homo sapiens; identical to SEQ ID NO: 60

SEQ ID NO: 235 - DNA, 1381 bp, Homo sapiens
ctgagctgctgatggattgaatacattgagaaggaatgtgtcatttggaatccaggaccagtcagcaaggataactgcctgattttatgatttcgtgactgatgctgaaatggaagccaaccactgcagaaatttgggggaaaatgagatctgaagaatacaaggggaagtaggaattcatttctagcatttccaaacctgcttaatcgtgtctgctccaccacagtcagaggaaaagactgagttcatggaaattaccagctaagccttacatctgtctttaatgtttttaggaagtatactgaaaaggtaagtgagatgtctgttttgaagaaagactcttactgggtaccttaaaacccgttgtttcctattagtaaagatgggcagcttctttattcctagcttcaaaaagccttgcccctgtttggtgtgtttctcagtattgtggagaaggtagtttctgagcaaggtggtgcttttcctctgcttctcagcagctaagacagaaattgcaccgaagtgtacaaagggccaatttttgttgtcctgttgtgctcaaatccttttttttaaaaaagttatttcaatcaagtcttagttttattcctcactatataggaaaaaaatctttaatgcctcaaaagttccattcagcattacatttgcattactcttatttgcagcaaatatgagtaaaattataggtttttaaaggtctctaataacatccacttatattggttttgtagataatccataaattaccagaaataaattattccacatttattacacacccatgtaatagatgtcgtgccaggccctggaatatactaatggcatcacctcatgtggtaaaaagacacattccgccatcctggagtatacaaaggtagactagcatatagttcatgtgctcaaggagttcatttttattgacatgatacagatagaattgtagtttagggaatcaaaatctaataaaatgaggctaattccattttcccattaacactaataactagtgtgtaaatctgaatatgacacattctatatgaaagaagctctgtgtgcatctacactaaatactcgtgtgtgccaggtactgttttaaactacgtatatttttttaattctcataactgttctctgaggtatgtactaatactaaagcttattgttaaaggaaggcagaaaaattaagtaacttggcctaagtttgcataactgtgatctgggatcaatatttgaacccatacaggctgattgcagagcctgcactcttaatttgagtgtgatatttatgtgcagtacctggctataagtacccacaaaacgtttcaaattctttataaaatttgcttagttaaaaaagtac

SEQ ID NO: 236 - DNA, 1846 bp, Homo sapiens
aagattaatgagatactttacattttcatactaaatctttttttaaatttttgtgagtacatagtaggtataaacatttagggatgaagtttcttactgtgttttcccagtaacaagcactggcatcagctgtcatgatttctccccaaggcctaggatggtcagcctcgcacgctccacagcagagtgactgaagctctatcgaggtgtggcacgagcgtgttgtcatttcaagagaatctgcagcctccctggtttttaatgaaagctcctatgcagggcctggccctttcctggggagggaaggctggctgtgtctcccgctgcatcctcactgggaacttcattcctgagctgcgaccgctattttttggattggaaaatgccttgggaacggctcatcttcctgcggcttgagcccatttgttttctgactggtggtcactggtgattagagtgtgtcccaaagggaaccgtcaccttagttctatcatacactatcaataacttgtccagggctgactttgtggctgtgtggcttgcccagtggtagagggccggtgtgcagaagggccccacactcaatgtttggctgtccccggtcttaaaattcttagtcattcttgaacaagggaacccatattttcattttgttctaggctctgagagttacataattgattctgactttggctgttggtcaacagtgtcataaggctgttgtagaatctgctcagccagggaggggaaaggagtcggcaatcaggtctcctcctgggcacctttgtgaggccagctggcgagagtggggggtgacactgaggtcccagcagctccaaatgcaggcagagccctgtcctcagagaaggtcacagcctagccaagcccagccaggtggatgggcccacggaacgcacaggaacctggaacggaggttgaaagcaggaagcacagtctgtgactccccagcccactctgcattcgaccacttggggcccagaagcttcaggaaaggtgcacaaggtcactgggtcccagtactcccaacaggaaggtctggtccagggacagggctcttcccgactccccttagccacacgcaccagaagttctgcagtgcccagtgggcatagcagtccccaagaatgacccagcactgaagctgagccaaagaacttggggagcgagccacaccccctcactccctcttcgcctgctccagacttgccaggcggttgcttttcgtgggaaccgggatgtcctcaccaccctgtccagggcccagccccatgtccctggcctgctacagctggaaaaaaaaaagagagatgtttgtttttatttgtttataaaaagaaaagtgttatatatataacatattatacctcatgaatacatacaattatttgtcaattaacaataaagaaaaatacagcaagcaaaaaagactctcttccacaaaaatagtgttcattacagaaaagtacaaaaaaaaaaaaaaaaaactaagaggatatttagaattaagaaaaaactaagagggtatttagaattaaaaaataaaaagaaaacaattacccatgaggtaattactgaatgcatttggttgaaagtccttctgctatattttccaaactgtatgtgtatatatgtgcgcatgcatatatgtgtttgtgtgtgtgtacacatatctatatgaatggaccatatcgtaagttataaatgcatacatatattcatgtatatataatcattagatcatactataggttattttacagtctttttgttgaatacgttgtgagcattttatgtcattattttctacaagatttgaaaaataaag

SEQ ID NO: 237 - DNA, 1597 bp, Homo sapiens
agccttctgggtccgaggctcccacctgctctaagcgcttgacaccctttaaaaaaatgtatttaaagaggctggttcctatccatccgactggaggcatctcagtgcaagagcaaagctaagtcctgcacacgctcctcccctcctcctcctccttctccccccaggttttcccgaatgtatctactccggttacaactagacgcggcccctcccccacctgcctccccccttccttccctcgatcgtggagggagcgttctctgtgccttcccaagtccccgtgggggaccttctatgttggagtggggggagggggggagggtcatataacgaaggccagaaagaacaaattagataatcaaaagaattatagtaattgctttcactttcccccgcccgctcagcggattccctcccccgcccctcccctggtttttctgtctgtcgggaatactcggtctttccgaccccctcccctcccccaggttcctcctctcctctccccttgctcgcgcgttccctctcttcctccgttttctggtgtgctggaacgttcagcggaatatgatgaatgatcacctgtcacagcttgtttattataatgcaggcaatcaattacacatccccaatgctggccggcccgcaggaaatttatatgctcagcacaaaccaatgtgaaaatggaatctcatttgccaaatgtctttctccccgtacagcacgatgattacagtctgtgtttgtttcaacagtcgtgtacaactgacagtgccatcatttactgcctggctcaggtcacgttactctaaggctttatttatggtgttacgaagggcagcacaggaaaaggacaagggtgtctgtcagggatggcactgtgttaaaaagtgggcgtgcaagggccgcattcccgggcagccgctgcaacctcagcccctgggcccttacctccgcagcctctcccagcatccagctacccagactccaaggccccaggcgagagccagctctcggtacctggagctccacaggtcccagaatcggggtggatcagagttcaaattctggttctgctactgtctaattgcgtgctgcagggactcaatctcttcatctgggaaatgggagtaataacccttggcaggaatgttgcgatcctctgggatgtcagaggtgttgatgaatgttagttcccgggacttcggaaagaggtcccgttggaagagatgtgaattggaattcacaccctatattaaaatctcctccaatcttcacctctgagacatggctgtctcaagactgttttgtttcccttcctggtggaattttgcacttttatgtcctgtgtagcagcaggtagtgtggctttgagaaaataaaatggccaccttgctccgctgttctttctttgtaaaaaaaaaaaaaaaaaaaaaaaaacggcatagcaatcttggcctttctagctgtgtgaccccaggccggtcaatccctcctcctctccaagcctcggattcctcccctgagaagtaaagaaaataactcctaaactgcctcccgaggcttgctggcaggatccaaggtgtccagagatgtt

SEQ ID NO: 238 - DNA, 363 bp, Homo sapiens
agccaacaaagggccgttcgcctttcatggcctccacagcagcgttgccgtggctgtcacaaattctctgcaccccaggagtgccgcttggacccccgggctcgctgcgtggtccatatctaggtcgggcctctcacggagactttcccaccagtgtaataaagaggagaaaacgtcacagcggaagggcctgaccctgctgcatccactaaggaaacagctacggggatgggaccctggaagctgctgtgggagcctcatccaccgcttctctgaccccacccaggctgcttcccaggcctcagggtcttagtgtggacctccgggccgtgattaatgcaggtcagcaggaccagagcgccc

SEQ ID NO: 239 - DNA, 4737 bp, Homo sapiens; identical to SEQ ID NO: 169

SEQ ID NO: 240 - DNA, 1179 bp, Homo sapiens
ttttcccttttgccatgtaatgcaacctactcgtgggtgcccaggattgagattggacgtctttgggaaccattactcggcccatcacatctgagtatgttgaagtcaccgaggatcaaggagacagcactgctggagagggcgatagtgaaccaggaactacaagagtcaggactgagaggaacggcctggggcccacagggaatggctgcaatgaggggagtggggcctgaatctgatgacagctttgggggcttaggaaggaaggaggcagaaaggtctgagaaccacagtgaggagtgaggatgccaccccacctctgggccaagggtacaaggtccctgtgcaaactcccccatgtgggaggactttggaagggaccacatcctctggcagacacagacatcgctggagctgtgaggtccaggaacatcctgagacaggatgtggaggttttgctgatcatgggctgagaattccaaggggcacagcgggaagacttctggatttgggaatggggtatggggagacaaaataggggtgtgcagagccttgtggggatgtgaatgcagggtgtttgggggacccagtgtgactgacacaaacagggaaaaggcatgatgagctcagtcctggtggactcaaggcagatgatggtgctgaggctgtgggagacgagggaggaggctcaggggtggctttcacctgggctctgtccatggaggtgaggacagggagatagttgggcctcagtgctgtgtggaccctttcttgtctccctgatgactggatggagggcctggaggaagaggggtcttagaggattcactcatgtccctgggggagggggactcactccaggtctcaggtctgcactgacacatttgtttgtggcttggggctgcctgctataaactattgggggttcgtccattttggagttataacctaaggcagaaactcagatggttcaaatgtcctcttcatgaagcaatgttatcagcgtatcatttagattgtcttgcaagagtctcatttgttgtttttctaaatgcctgccaatattgtttgaaaatctacaaatgtgataaatgtatcttcaaagttaactggttgcaggttgtttaaccttatatgtacagtttcacatatgtataaaaacagtagtttgggcctctt

SEQ ID NO: 241 - DNA, 315 bp, Homo sapiens
cagagtgcggtggcgccagcacagaactctgctcaatgtccctctgtgctttcacgatgctgatggattatgaaggacctgaaagggttttgtctatcagctgcacccctgggtagcgacacaaccttggggaaggcctcagccccatccctcgtacagcaggaatgagaacagcactgcctgttgggaagcttgagggaggctatggacgtgcagcgcttggcagagggtctcgtcatggaaggttccagcaaatgtgagatacttttctgatttcattttctccaaaagaaagggaataaaagaagaggggag

SEQ ID NO: 242 - DNA, 575 bp, Homo sapiens; identical to SEQ ID NO: 154

SEQ ID NO: 243 - DNA, 362 bp, Homo sapiens
ctctctctcaggcctgctgtcaatcggctccgcatcctctagttctgcacatccccggccatcagagcacgaacttctggtcggtccgcctgccgttctttcacctatagagcccaccctctaaaggtgtccaagctgctccaaagaacaattgattaacccaacggctgtctttggccctcagaactgtcacacctggctccgcctcttcccggacatcatctgttgcaccagagactggcgggtctggaaagaagctctgagcccatccgcgtttctctgttggaccctgtcaggcacatttattctcgtcatactacagatggggaaacatccgtaagtggcagagatgggatttgaac

SEQ ID NO: 244 - DNA, 1606 bp, Homo sapiens
ccgctcctgggccgcgcggctgcagccgggagcgcggactcggggtgtcgggcggtgtccgcgcccctccccaccccagggcccttctcgggggagatatccaggagctgaaagagattcctcaggaggaagtggaaacctctgaaaggagaggaaaccgactcttttgcaagaaaactgagcgccggctggaaggcctaaggaaagcagccgatggctcccaagacaactctgtccggccagtactccagggcaacttcaaccccactaggacccaggccaaaaccatatatatatatatatatatataaattaacgcaaaacagagccactttggtgcctacccctccacaagtaggtaggcacatccaggtagctctgtcagaagatgggacctggcgccttgcaggggtagccctatggagatccagaagccccgtttcgagctacgaagtctctcttctactgcagtcttctctccaacgtggagatctagcaacttccctccccctgggattccctgtgaatccactctagttgggatatagcctctctacagctcagtgacgtagcgcgccaaaaccaagtacccaccccggcaactggaagacctagctgtcctccatcccgcctccgcagtcgataatctccaggatccaagcaaagtgcctgtccacgttgtcaccagatccacaagcgcttttgatgagagctgctacccttttggaaacacgattccctctccctagtagagaagaatctattcttctgggctggcgtagacaaagaataaccaagataaagtatgtggtgtgaaaatatcagctgcctcttctttttttgtttttgaaacggagtctcgctctgtctcctagggtggagtgcagtggcactatctctgctcactgcaacttccgcctcctggattcaagcgattctcctacctcagcctctggagtagctgggactataggcgcccgccaccacgcccggctaattttttgtatatttagtagagacggggtgggggggtgtttcaccatgttggccaggctggtcacgaactcctgacctcaaatgatcggcccacctcgacctcccaaagtgctgggattacaggcgtgagccaccgcgcgccgggtggaaaacattagcttctaatagcagtcttggagtggagtgaagacgttcaggaagtggtggagataggcctgctcaattaaccggccccagatatcatttctctggctacctcttttctcgcctggcctggccctctataccgttttttgtttgtttgttttgttttgttttttttctgcaaaacgttttctgctgcaactttctctttatttatgcctttatctttcttaaacaagaggtccctggaaataactaactaaggaggggagaggaaccccctcacccccaatttcatgaatgagtgctacattcatgctggccgggtaccaagagcatctttagatctttagacctgagtcttctcatctgtgaaaaagaggttaaagcagatgaaccctaaaggcccatttccagtcttaaattcaacactttcaagacaaaacttttcttctgtattcctgag

SEQ ID NO: 245 - DNA, 1803 bp, Homo sapiens
ctcgggtcccctaggtcgcggggcagccggggcggaaggggcttgttcattattttgagagtttgttgtgaacgtcataacctttcgtccttaaatattgccgatacttgacctacgcaagagacaatgtcatgtgattcagcctaatatctcagaggatgcagcattcaaggttctatcttggaagcagagactgtgccctcaccagatgctgaacctgctgagcaccctgatcttccacttcaccttcatcagaactactgctgtgattgcacctgccatcttatgcagaaatgacctgaagacagactgaaacaacgtgttctacagcctgaaaatatctaccttgacttacagttttattaatgctggtgtgatcagactggacaaaaattagcatatgttattaactgatctaattcaagtgccaattcttaatagaaacacaaaacaataaaagcaattcagaaaatatttactatttgatttcttcaagctccaaacaggcttgtgcttagctgtagaaacttgaatatatacaaatctacatggatagaattcttagtcttctttgggccaggtgtgttagccccttgggaaaggataaagttttggaatatatttttattcatgaacctgctctctttaagacttctgaggaaaagagctgctgggcagatgagtagaatatgttactactgttccgacatgtctacccatcaaaactagctgatacagtacactttaatgacccttctatagtcaaaactgacattgacattgacattaacagaaaagatttgggacaaagaactgtgttcatgcagcaaatcagcctcaaacttcaccacaagctgcacattttatgctactgtattctgcttaagcacttatttgtatttatgtaaactgaatgatcctttaatacttaaggactttattctgggtgagttagaatcacactgttttggcaggaaaactctttgataggaaaaactgtatggcttgataatttaagagctaaaagtagccaaatcaggaactactgaaattcttcagtatctgttagaatatctcctgtttgagccatgtttgtaaatgatgttcaaaggcatttcaaaagcatgtaaattaaaaaaacaattcatttgattctgctatggtttaaatatatatatccctccaaaattcatatgttggaacttaaaccccaaggtgatggtgttaagaggtgagggctttgggagttattataattaggccaggagggctctgtcctcatgaatggcattaatgccattataaaggagacttcagaaagctgcctggcctttttctgtctcttctgccctgtaagtacacagcattcatcccttttgccctcccaccttttgccatgtgaagatgcagtaacatgaaggcaccatcttggaggcaagagcacagctctcaccagacactgaatctacctgcaccttgatcttggacttcccaacatccaactatgagaaataaatttttattatttataaattacccaatcttagtgttttgttatagcagtacaaacaaacagagacagattttgacagtcatataaaacctcaagtactttgtaaaaagaaaatataaatgttgaatgattgaagaacgtgaaagactggacagtgagaaaacatgggggtaggggttgtagaaatggagtggtattcagagacataactaatttaagctatctctaggacaaggttaaataacagaaaaatcaaatgggcctctgactggtagcgtgttttgtttggg

SEQ ID NO: 246 - DNA, 381 bp, Homo sapiens
tttagatccgttggctgaatgccttttagtctgcatacatgcatctcataccgcacagcccaaatttctacaacttgtccaggtgcagtctcctcagaactacaaagcaagaaaagatcacctttgggctcaggaactcacagtcgttctccctctcccggaaggcacaatgaccaggacagtaccgagctttacagccatattgaactcaccatcaactcagcacattcaactcaatcagtcaaaatcgtcttttcctgctggtaaataacactgaaatacaaggaagctgagccttcacaaggtcgaacaacacatttgatgccatgcaactgagaagtggttcaagctggatttgaacaaatgtagtcagactctgca

SEQ ID NO: 247 - DNA, 789 bp, Homo sapiens
gagccaggaaggagcctctgcagaaacggaaccagcgggaaccttgacctgagacttgcagcctccagaactgggagaaaatagatttctgttgtttcaagcccccgagcctgtggtattttgtcccagcagcctgagcaggctgaaatggtcccaagttcttgtcccacatccagaagaataaggttatgcagacaaccagagagtgagcagggcagaaaaaaacttctattgcatgatggaacagctcccagcgttgaggggacctgagagtgggcagccactacctgaagcatcattataaactgctgatctactgtttctttgtcaaacgggaggagataacatgagggtcatgagaaatgtttgcagacggagtgaatgccttgaaagtgctgcgaccaggtgctgacacccggaggtctggctgctcaaagtgttagctgacacggaagacacacggactttccctccattccccaaaactccccttccctgactcgtcagctgcataaaaaccctctccttatctctttgtcaaggggatttgagaaatcttgctgtcttgtcttcttgctttggccaaatggaataaacctttctctgtctccagacacctatgtcgcagtgttcggcctcagctatacggcaggtacatgaacctggtatttgggcttctacaacaattgtacttatagcacaaataaagtacaaagtgttagggaagaccaaagaccataggtagaaaacttggatacaacttccaaataaacactcttcaaaacattt

SEQ ID NO: 248 - DNA, 552 bp, Homo sapiens
cacggtgtcttggaaaatggaaagaattgggagccttcctaccgctggtgaaatctaggagtggcagttgagggcttctgttcacaaagtctggccatgtttctgtagggctgctgtactttgctgggcttcttctccagttcctagtctccttggattttccagtacctggagctatcaccagtgaaggctgtgaaacagcaaagatgtcagcctgcctcttcctctgggagctccggcccagcgaggtacagacctgttgccagcccaaatgcgcctgcaggacaaggctggagaccctggttgggaggtctcacccagtcaggaggaacgggatcagggaactgcttaaagaagcagtctgtccatgctttcacagatcagctgtgctgtgctggggcactgcttccacccctggttggtgtgggctctccaaagcctggaggccggaacagctaagtcgcccaaacagcaaagatggtggcccctccctccctccgggagctctgtcccagggagaattcaaatctctgtcagccagagaacaccagt

SEQ ID NO: 249 - DNA, 2147 bp, Homo sapiens; identical to SEQ ID NO: 108

SEQ ID NO: 250 - DNA, 668 bp, Homo sapiens
gatcggggtatcccagctgctaattcccctcctaacagccctgcagcgcctggattggaggtgtgacaggtggcatttttggcccgaagtccctaggcaggacgggtggctgtagcctgcgcgtttgtgtaaattaacctccctttttagttctgtgaagggagaacgtgattagtttaaaatcacctgcgtgaaagaggctcttgattagtttaaaatcacccacgtgaaaggggctcttgattagcttaaaatcacctgggtgtttcgttttatctcagttggcctctgaatgtttatcctacagcttcctgcaagctccagtctaccttctaagggaataacggggctcgtctttctacgttactttatgtgggagtagttgtaaaacagaatgagggagaccgcggggattgtgcggaaatgtagccaccgtttacatgtcgggaggctgaggtgggaggatcgcttgagcccaggagtttgacaccagcctgggcaacatggtaagaccccttctctaccctcccccccaaaaaaaaaattttagtgtggcatggtggtgggtgcctgtggtcccagctactcgggacgctgaggtgggaggattgcttgagcccaggagtttgacaccagcatgggcaatatggtaagaccccattatctac

SEQ ID NO: 251 - DNA, 806 bp, Homo sapiens
gaggctaattcaggagtccttttattgccggcgaccgagagatggctagagctcaaaattctcttggcctcgaagaacgggatagatttctttttaaaccatggtctaaataggggagggggagcctacttgaagcaatttttacagaagcagaacaggcaaaaagttaaaaaaattaatggttacagagatagttacagaaaaatacagttccaggtgcaggggcttaaactatcacaaagagataaatgcaggggcttgggtaccatccgccgagcacgtccccaggagctgctggtacagcttgcctcaatatcttatcagtaagtgcattcctggatgtgcttggagtcagcttgcactagttattcccttaagggagggggataaggggactgcaagtgaagaagctaaaatggagagtgtccagctatctcagctaagagagagtcactctgagcagaagggtcagaagtcacccttctgacccactgtacacgtaaacttggggcagtatatgaactaacacgcacaggagaggtccaggttcagtcccattgatgcaatgagtgagcctgaagtgtaggccagccaggtattgttgggtgcctggtaggagactgaggtgtttaaggaagtaagtagagactgattacaggtagcctgaaagggagaagcagataagttatacctggtgctaattcgacaggaggcgttccctgacacgtctcctagtgtaagggcatgggggcatgtacgacaagaaagagagtcaattttaatcatggcttctactcctaatccaa

SEQ ID NO: 252 - DNA, 428 bp, Homo sapiens
ataacggggctcgtctttctacgttactttatgtgggagtagttgtaaaacagaatgagggagaccgcggggattgtgcggaaatgtagccaccgtttacatgtcgggaggctgaggtgggaggatcgcttgagcccaggagtttgacaccagcctgggcaacatggtaagaccccttctctaccctcccccccaaaaaaaaaattttagtgtggcatggtggtgggtgcctgtggtcccagctactcgggacgctgaggtgggaggattgcttgagcccaggagtttgacaccagcatgggcaatatggtaagaccccattatctacaaaaaaaaaaaaaaaagaaaagccgggcgtggtggtgggtgcctgtggtcccagctgctcgggacgctgaggtgggaggattgcttgagcccaggagttt

SEQ ID NO: 253 - DNA, 2258 bp, Homo sapiens
aataggagaaaagcaaacaaatttattaacttgcataagcatggagccatgtaaaatatgagactcaaggaagggccagatggagcttacatagttccctcttcacagaagagagggagatgggggaatacaggctattttgagggataataatatggtttggctgtgtccccacccaaatctcaccttgagttgtaataatccccatgtgtcaagggctgggccaggtggagataattgaatcatgggggcagtttcccccatactgttctggtggtagtgattaagtctcatgagatctgatggttttataaataggagttcccctgcacaagctctcttgcctgcctccatgtaagatgtgactttgctccccatttgccttcagtcatgactgtgaagcctctccagccaggtggaactgtgagtcaatcaaacctctttcctttataaattacccagtctcaggtatgtctttattagtagcacgagcacagactaatacagtaaattggtaccaggagtggggtgctgctgtaaagatacccaaaaatgtggaagcaactttggaaatgggtaacaggcagaggctggaacagtttggagggctcagaagaagacaggaaaatgtgggaaagtttggaacctcctagagacttgttgaatggctttgaccaaaatgctgatagtgacagggacaataaagtccaggctgaggtggtctccgatggagataaggaacatattgggaactggaataaagatcactcttgctacgcaaagagtccagtggcattttgtccctgccctagaggtctgtggaactttgaacttgagagagaggatttatagtatcaggtggaagaaatttctaagtggcaaagcgtcaagaggaagcagagcataaaagtttggaaaatttacagcctgacaatgtgatagaaaagaaaaccccattttctggggagaaattcaagccagctgcagaaatttgcataagtaataaggagccaaacgttaatcaccaagacaatggggaaaatgtccccagggcatgttagagacctttgcggcagcccctcccatcataggcccagcagcctaggagggaaaaatggtttcttgggctgggtccagggaccccctgctgtgtgcagccttgggatttggtgccctgcatcccagctggtccagccgtggctagcaggggccaaggtacagctggggccatggcttcaggaggtgcaagccccaagcctttgcagcatccacatggtgttaagcctgcaggtgcacagaagccaagaactgaggtctgggaacctctgcctagatttcagaggatgtatggacacacctggatgtccaggcagaggtgtgctgcaggggcagagccctcatggagaacctctgctagggcagtgcagaagggaaatgtggagtgggagcccccacacagagtccctactgggacactgcctagtggagctgggagaagaggaccaccatcctccagaccccagaatgatagatccaccaacagcttgcactgtgcgcctggaaaagccacagacactcaacaccagcccgtgaaaacaactgggagagaggctgtaccctgcaaagccacaggggcagagctgctcaagaccatgggaacctaccccttccatcaggatgacttgaatgtgagatatggagttaaaggagatcatttcgcagctttaagatttgactgccacattggattttagacttgcatggggcctgtagcccctatgttttggccaatttctcccatttggaatgggtatatttactcaatgcctgtacccctcattgtatctagaaaataactaactagccaggcgcggtggctcacgcctgtaatcccagcactttgggaggccgaggtgggcggatcacctgaggtcaggagtttgagactagcctggccaacatggtgaaaccctgtctctactaaaaatataaaaattagccgagcatggtggcaggtgcctgtaatcccagctactcgggaggctgaggctggagaattgcttgaacccgggaggtagaggttcaaattcctgacctcgggtgatccgcccgcctctgccttgcaaaatgctgggattgtaggtgtgacagaccatgtctggccgggtatgtctttattagcagtgtgagaacaaactaacacaggcagtgaatgatttttaggagaactgagtggacccaaagagcagagagtagtt

SEQ ID NO: 254 - DNA, 4212 bp, Homo sapiens
tgtcccagaatttcacctgaatcacaaagcgtggcgcctcggggcctggctcccttcacgtggcctgatgtctgcatattcatccgccgtgcagtgtgtgtccacggttcattttgtgttgccacggagcatctcattgtgtggccctagcccagtgtgttaatccgttcacctgctggtgggtgttgcagtggtttccagctcttggttatcaccgagaaagtgactgtgaacttccgcacacacgttttgctgaggacaactccttccatttcacttggttattaggagtggagttgctgggtcctagggaaggtgtgtgtttctctctaaaagaatttgccaaaccgatgtccaaagctgtaccatttcaggctcctgcctgaaatcatgctgtgattgtcatttcagggtccacgtctgacaagtccaccgtggctgcccttctgggcctgttgctgctgactcacgttcccacggccacctttccctgcgtctggacgtagtagcaatttctcgttggatgtggacattgtgctgtgaccgctttgatcacctggcatttttgttgggttgtttttggccttcctttaaaggacgctgcgctgtgttctgcgtggagttcagctccttgctcttcactttggtcttcgtgtggctggttctgaagcctctcagagcaggtccagcccagcctttcctgcaggaagagtccagccccactcccaggacgggccctgctgggtggctgccaacagcccaggatcctccaggactctccccctggcggttggaactcctgtctcccacctcccgccaggactgctggacctgcctggatgcccgcccctgctcggccatcctcaatgggcctccaccccagggctggggtgacccgggctgaaaacagttcatcctgagtttcagtctcgagctttcgtggcaggagggaaactgctggctgtgttactccacggcggctggaacggacgggaccagctcccttcagaggggcacttcggttggttctagaattctcctttgctatgaaggctgccgggcacattccacaccagccaccctccacctcgcatgtgcgtttatcgatgaaacgccacagtgggacctcctggatcaaatagtgcaatgatgtaaacgcttagtattgtcctggaacctgcctccgaaaaggccgtgcgctcccgcctgggatcctgctgctcctccgccggccgccccgcacacgctccgctgcctctctgggctggctcagccgttgcatgttcctgcgtgtgcactgagacgtccaccctggcacgcttcttcccctcggcacgtggtccccacgctgtgcctgcccagctcggagcccagaggcccccgcagctccccacaacttcatggtgcagtgacctgaggcctcccctggctcagtccctttcccagggtcaggggtccatgtattgaaccaggacgggaggtgccttccccctgagctctgtccctgctgaacctggaaggcagcgcccggtggcggctcagacccccagagcctcttctgaggtccgacactcctctgctccccccagggagaccccctggcctggcccccagctctcggtgcctcggtttcctcacctggaaggtggggatgttgaaggtgcctggcctgtggctgtgcactaagctagggtgactgtgagcttccagagctcgaatgtctggaaggaagggcgcgagctgggtgcgtgtgagtgtcctgatcatggacacagagcgtggggccccttggagggctggaacccaggtgggggatgcctgggtggtgggacagagtggggctggaggagagggtctgaggaatgttccggccacagacaccccaagcccacgggaggtcaggagttggtcacaaggaaggtgaggtggggaacagagctggggcccagggtcctgatttggggtgagaggtgacgccatccccgagtcagaaagacggccaggggaggggaggaggtggggaaagcagacagacggggaggcggggggagcccagggccaggagtgtcaggggcaggcacttgagacagaggcaccctgaggtttcccagcaggcaattgataccctggcctgcagcgtggaggaaccggggctgggctggaggcctggggacgcctggggctgccccaattcccagcagacacctcaccctctgggaagccccagctgccccagatccctcccacaatgctctgaccacccccaacccccaagtcctctcccttctgtccccaagcccgaggccttggagctgcccccgccctgggccatgagagctggacacagagccctccaagttccacgggcctcctgcaccgccgcctgctccgccctcctgccctccccctcggcctcccctgtgagggctgcccacctaggtgaccccggagccgcctcctcacgcctccatctgctctgcacaccgtccactagcctgacagctgcccaaagcctccagagcacagaacgggcctggtgtctgcgcctccgtctcggggtgggccacggccggttctgtgtcccgtcccctccccgctcaccagcggtggaccccagcttccctctgcagcagcactcaactcacacactttctcagagacgcgcagcccacctcgcccccgcagtttcctcttcatccctcagagccccccatggcctgggcagtccatcctgagtgtccgcaccacacgactgtagacgtttggcttctggactcaaatccttcaccagatcgtgaccaggatggcaatgaccaggcctcggcctcagccccctgcctggcctgcactggcacagcattgggtctggggagtccccgcgacaggaggcgtggggctcggggtgctcacctgcctccctctccctgctggtaatggtgggccccgggatgggggcagtgatatcctgcgggcagccgtgtcaatgcagatggctgggtgctgggtagggccccgtctcccgcctccttgggctgcctcatttccttcctgatgaccctggggtcctgcacagggcctggcggtgctggtgccgggagagcccacgctgaatggatgaaggagtgagtgctgtacttagcggggggcgctgagcgctgggtggggagcccaggacatttcctcctgctgcccgggaggtaacaccctggacccctggagtctgcattctgtgagagcgggcaggccacagagaagggagaaaagggacggagggccgaggcgggcggatacggggagcagggagcggggacagggcttactcagcaatcagagaaggcctcaaggaagaggtgacatttcagcaaagacctggcactgtctgtgccctcggtggggcagatgggctcccttcagcccccttgaggcctggcacctggggccctatgtcaggcttggggccttggtgtgggagctgaagtcggggtaggaggggcatggaggaaggggcaggaggggctgagtctcactgatgcctgtgttagtcttgtctcttgccatgcctcagtttccctcctccccagggtggggtggatgagacgactctggaggacgtatctgagagagtggggttggagccccgtaccggcaggtgtaggcgctgtgtctgctcttggaggttgggcgttcttggggagttggtgagggaacgtgctgtccctgcaccctggagcccccatgccctcctggggcccccgggagtggaggatgcaaggggcccccttcttcttccttgcaagacccacatggctctgcatgtgggggacattcctggcagggggcgctgagggccaggatgtgagtgcaccagggaaacagcagatggggctcctctcccaggctccagctgtggggtgggagtccatgctcctgcgtgtctcttgggggcttttcctccactgggtgccacctggtcccccaccctgcctcagagtattggggtctgggctcgtccaccctggatgctggccaggagtgcacctgcctctggagctcgggacgcttggccccacaggacggtgtcgcacaccacagccggcctaacttcacccctgcctgctccctctccagggccggcctgcagggctgcacactttctagttggggtgcaggtccccgggctcctgccacagattcctgtggctggccaccctg

SEQ ID NO: 255 - DNA, 298 bp, Homo sapiens; identical to SEQ ID NO: 6

SEQ ID NO: 256 - DNA, 1290 bp, Homo sapiens; identical to SEQ ID NO: 176

SEQ ID NO: 257 - DNA, 4860 bp, Homo sapiens
gccatttcttttttttctttttttttttaagataagagtctttctcttgtcacccaggctggagtgcaatggtgcgattttggctcactgcaaccttcaccttctgggttcaagcaattctcctgcctcagcctcccgagtagctgggattacaggtgcccgccaccatacccagctaatttttgtatttttagtagagatgggatttcaccatgttggccaggctcctctggagctcctgacctcaggcaatctgcctgcctcagcctcccaaaattcaaggagtacagatgtgaacaaccacgcccggcctccatttcttttttgtagtctttaataaacagctgctatcattgcagacttgctgtttaggcacttaggaatttttcactagaaggcatgtaaataaagaccatgggcaattgtaatgaatttcgccttcattctttgactacatgactgtccccagagctgtaactttattgaattttttagaagccatttagctagcaactgagcctaaccagccactcactgtcattattcagtgctcttttattattgtctatttctcctccaacttggctacactcacaaagtgataaaaacttgcatttgttttctttccttttcagagacagcgtcttgctctgttgcttaggctacagtacagtgacatgatcatggttcactgtagcctcaaactcctgggctcaagtggttctctcacttcagtctcccaagtagctgggactacagacatgtgccaccatgtccagctaattttttatcatagagacgggatcttgccatgttgctccgactgggctcaaaactcctgacctcaagtgatcctcctgcctcagcctcccaaagtgctgggattacaggcaggcatgaccacctgtgcccagccccctattattattattttaaataatagctttattaaaatattcacataccattcactttatttattgaaatctgcaattcagtaggttttagaatattcacagagctgtgcatcgatcaccacagtcacttttagaacctttcattaccctatagagaaatccataccccttagccactacctcctactctccccacctacctttgcccccagccttaggcaaccattgattaatttttttgtcactatagatttgcctaatctggacaaatagaattgtacaatatgtgatcttttgtggctttttttccctcttagcacagtgttttcaaagttcctttatgtcatagtgtgtatcaatatttcattccttctatggcagtattccatggtagagacacactgcattttgtttatctgttcatcagttggtggatatttgggttgtttccatgtattccatgtattggtcattatgaataatgctgctatgaagattgttgtacaagtttttgtgtggacatatatttttatttttctgggatatatgcctaggagtgaaattgttgcattataggatgactgtacatttagccttttgagaaactgccagaatgttttctaacgtggctataccagttgggtgcaatggctcacacctgtaatcccagctactcaggaggctcagctaggaggatggcttgagcccgtgaattcaagaccagcctgggcaagatagtgaaaccccgtcttgattttttaaaaatccaattaaaatgacaagaaaagaaatacccaaacaaaatggttacacaattttatgttcccaccagtaatgtttgtgggttccaattcctccacatcttcactgacattttttttttctagataggggcttgctctgtctctcaggccgcagtgcaatgatgccatcacagttcactgcagccgtgacctcccaggcacaagtgattctctcatctcagcctcctgggtagctgaaaattacaggtgtacgccaccatgcctggctaatttttagatttttctgtagtggtgggattttaccatgttgcccaggctggtctcatactcctggcctcaagtgatctgcccacctcagcctccctaagttctggaattacaggctgccaccatgcccggccttcaccaacatttgccattatctgttttttttttcttcctttataccttaaagcagtataagaacaagtgtcttcaattataggaaacagtataatcccagggctttgggaggctaagacaggaagatgtcttgatgccaggagttttttttgttgttgttgtttttgtttttgttgttgttgttgttgttgacagtctcgctctgtcacccagggtggagtgcagtgatggggtccactgcaacctccacctcccaggttcaagtgattctcctgcctcagcctcccgagtaggtgagactacaggcacacgccactactgcccagctgatttttgtatttttgatagagtcagagtttcaccgtgttggccaggctggtctcgaactccagacttcaggtgatttgcctgccttagcttcccaaagtgctgcgattacaagcatgagccaccatgcccagcctgatgccaggagttttagactagcctgggcaacctagcaagaccttgtctctacagaatatttaaaaattagccaaatgtggtggtgcctgtgtatagtctctctccctctctcttttttttttctaactttttgtgacatggtctggctctgtcacccaggctgaagtgcagtggtgtgatcatggctcactgcagcctgaaactcctgggatcaagtgatcaatcctcccacctcatcctaccaagtagtagggaccacaggtgtgtgccacccaggtcttgctatgttgtccaggctggtcttgagctcctggcctcaagcaatcctctcaccttggccccccacagtgcaaggattacaggtatgagccaccatgcctggcccctaccctgcctactgagaaccaaaggaaggatccaaattctccttagctcaactcgagccatttcctgattgcttcatcagcgaggagctggttattgggctgtccaggcctcccaagcagcacagaaatgaggtgaaggagttttcctgttgctccactctgtaaggagttggagggtgatgtttactcgtttgcagagagagatgccttgtaggcacctcaggatggagagggccctgattccaatgtcctttttttcttcagaaacaggaccttgccctgtcactcaggatggagttcagtggtcctatcatggctcattatagcctcaaactcccaggctcaagcaatcctaccatgtcagccttcccagtagctgggactacagctggatctaccatgaaagacttgtgaatccaggaagagagactgactgggcaacatgttattcaggtacaaaaagatttggactgtaacttaaaaatgatcaaattatgtttcccatgcatcaggtgcaatgggaagctcttctggagagtgagagaagcttccagttaaggtgacattgaagccaagtcctgaaagatgaggaagagttgtatgagagtggggagggaagggggaggtggagggatggggaatgggccgggatgggatagcgcaaactgtccgggaagggaaaccagcactgtacagacctgaacaacgaagatggcatattctgttcagggaatggtgaattaagtgtggcaggaatgctttgtagacacagtaatttgcttgtatggaattttgcctgagagacctcattgcagtttctgattttttgatgtcttcatccatcactgtccttgtcaaatagtttggaacaggtataatgatcacaataaccccaagcataatatttcgttaattctcacagaatcacatgtaggtgccacagttatccccattttatgaatggagtgatgaaaaccttaggaataatgaatgatttgcgcaggctcacctggatattaagactgagtcaaatgttgggtctggtctgactttaatgtttgctttgttcatgagcaccacatattgcctctcctatgcagttaagcaggtaggtgacagaaaagcccatgtttgtctctactcacacacttccgactgaatgtacgtatggagtttctacaccagattcttcagtgctctggatattaactgggtatcccatgactttattctgacactacctggagttagcacagaccccacaagttaggggctcagtcccacgaggccatcctcacttcagatgacaatggcaagtcctaagttgtcaccatacttttgaccaacctgttaccaatcgggggttcccgtaactgtcttcttgggtttaataatttgctagaacagtttacggaactcagaaaaacagtttattttctttttttctgagagagagggtcttattttgttgcccaggctggtgtgcaatggtgcagtcatagctcattgcagccttgattgtctgggttccagtggttctcccacctcagcctccctagtagctgagactacatgcctgcaccaccacatctggctagtttcttttattttttgtatagatggggtcttgttgtgttggccaggctggccacaaattcctggtctcaagtgatcctcccacctcagcctctgaaagtgctgggattacagatgtgagccaccacatctggccagttcatttcctattactggttcattgtgaaggatacatctcagaaacagtcaatgaaagagacgtgcatgctggatgcagtggctcatgcctgtaatctcagcactttgggaggccaaggtgggaggatcgcttaaactcaggagtttgagaccagcctgggcaacatggtgaaaacctgtctctataaaaaa

SEQ ID NO: 258 - DNA, 2851 bp, Homo sapiens
cttgtcacttacatgctccaagaggtctcagaactaggggacttcctcccctccctcctccttgtctggagctggcattaggccccacatcttccagacccaagaagggcatttactccaggagatggctgggcagaccctcagtaggtattccacgaaagtgttcatggcttaaacccaacacttgatttctccctgagccagtctctgtgaatgtcctcaccatcgtcctgtgtcactcctggcctcctgctaacaaccaaatctattgactctccagatccccaatgtctccatgtcacactacttccattgccaccattcctgtctgtatccttgtcttaggtccaccagatgaccggctggcctcctaattgggcttcctgcattcctgcctgtgctcggagctcccttctccacttgcctgctggaggaggtttacaaacaaaatcagatcatggcactcccctggggccctgcatcctgtggccagcaggtagggcttctgcgacctggccctggccacctttggcctcccgtcctcccattccttccaggccccactgtgccttggtgtccctgccctcctttctcctccccaacttcacccaccagttcccatctcccttcctttgcagggtgtttctgctgctggaattctttgcccctgggtctccgtgtggttagctccctttcaccacgctcagtcaaggtctaatattgtccccccaccacctcctgcattcactctccgtcccattaccctgttttactttcttcagagcactacgttgttttgttgtcctctccactaccctaaatagaatgtaagctccaagatgcgagggcatttcctgtcccatacattctgcatcccagagcctgggctggagctgagaaggtgctcaaggaatgtttgtcgcatgagccaatttcatagtgctccaggctcccaggtggaaaggtccttggtcttttctttaccaggtcttggaaacgcccctgtaccccagaaacttcctgatcagtccctggtcagtgtatatcatgcttcctgtgacatgacatcaacttttcagtgacttccactggttttggcccagctcgaagagcctgacacctctgcagggaattctaccagggagaagagaaagtagtcactgcttccagtttttttaaggagttggccaagagccagcaccaggcatcagaggaaggcagctgactgcactcggccacatcccaaaagtgcctggaaggggagggaggaagcaggcgcttcagaaggcactactgtgtgtcaggactcatgctaggaacgctgtaacagggagcagtgatggagtccttgagggagctcaggagggggaattgcactgaagatttgtcccatcgtgaagcaagagcactggaacttacactccaccatcaggccctgtcacaggagaacaaagaaggaaggcagaggagatcatgctccggccagcagggaatctccatttttttcagcctcataccttggaaagtacaaaggagtgagagctgggactaccagccagagggttcatggaggtagtgggaggggaagatgggttctgcatggagccactccagggacttttcttctgtctcacagcctgacaatcacctctagctgttctcagtcccattctcatcaatgacctcgtctcctgattttgtacaatatctaggtgaccttctcttctttccatcttcaaacgcttgatcattgatgctcccttttctcttctctctcctcctgggaaaagagaaggaccaacatccccctttcccttcctcctgtgctgtcccgacccctctgagacctggctctagcagtaagtccctctctcttctgcagcaccagcctctgcccatccctgccctctgcacacaaagctctcacattgtctgcactttaagaacttttgtggcaaaccctggcaaatcctgccacttgtttccactcttctcaaatggctttgaggtcatcattgacctatcccatttgaccctgtcctgtatctgatgttgtaccctttctccttgatcccactctggcaactctcccactcccctttcttggatcaactgtcttgctcctcagtcttgatcaatgcctccttctctctctttagccttggccctttttggccagggaaataaatgtgaaatacataaagcttcattttatcttatgattatagctatgttgatgttacccaagacctaaaagtcacactctctaattacacttccctcctgtgttctgggtcctcttggaccagtccttactctggctcccctcctggatgtctcccagacttctaattagaattactgtttcctatatcaagctaattatctttcccaccaacctcctccatccttgggtgaaagcatcacttggttgcaaaagtcagaaatctgggtttcattcttgcggtaggtagaataatgcccccaggccccaggttttgacatccgaatccctgggactttgcagatgtgattcagtttaggattttgagatggggagattatctgggagagcctgatgtcatcataaggttcttataagagggaggcaggagggttagagtgagtagtaagagatgcaacagtggaagcaagaggttggggtgatgtggccacaagcccaggagtgctgacagacatcagaagctggaagggacaaggaatggtttctcctctggagcctccagaaagaaccagccctgctgacaccttgattttagccttggaagactcattttggacttctgaccttgaacgttgtaagagaataaatttacatattttaaactgg

SEQ ID NO: 259 - DNA, 297 bp, Homo sapiens
tttctcccatcacgctcaggtgggaccatccagttgcaggaaaacaagcttaacacgcccactgattctacattatgctcctacctcccggcagcctctccaggcccagaactttctccagtcagcctccgcagaccaagctcatgactcacaatggcctatttaggcccataccctacctcacggcagtctccgcagatgaggctactgcctcacaacagcctccacaggcacagctccaccgttacaatggcctctttagacccagctcctgcctcccagccttctctccaggcc

SEQ ID NO: 260 - DNA, 534 bp, Homo sapiens; identical to SEQ ID NO: 3

SEQ ID NO: 261 - DNA, 327 bp, Homo sapiens
tgtcgtggtcgtggaatggacaaggacccagtctttagctgaactaagggaaagtcctgctttttggcgcgcaacaggggagctcaagaaacaggcctcactcacggcatatggaactaaccacgcccctaactaagaaggcacaccttagttgcagttagcacacaattaaagcaactctccaagttttaccttaaagttcaaaattgctaggagttgaaactactagaaatatatttacatgcaagagtcaaagaaactttgaactatttatggcctttaataattaagtaaggtatactcctgtgatcaagacttggagcatat

SEQ ID NO: 262 - DNA, 751 bp, Homo sapiens
atggtggcagatgcctgtaattccagctactcaggaggctgaggcaggagagtcacttgaacccgggaggcagaggttgcagtgagccaagatcgcgccactgcactccagcctgggtgacagagcgagactctgtttccaaaaaaataagtaaaaaagaaaaaaaagcaactgaacaagatcactactctaaaatttatttactgaatattccatgagtgtccaggaagtaactgagacttgtgtatttaatttggaaatgagacttctgagacaatcagatgcagacgaaaaattatttgcttcactattatttacttacctgagtgaattggtccttaatgttgtaaatatttcatttgctaactagctttcaaggtggcagaaaaggtgttttacttgaagaatttgaggagagggaagacttactgatttgcattatcagtcagtccccaattaccttggcataatcagtcccattatttagtgttactcatttttaaccagaactgtctgggtgtatcagagcacaattgggaagatgggctcttaatgtagttcagcctcctttaggggcctaatgaaggaagacttataaatacttctcaattatccttcagatgaattagcagcagttagcccttgttccagcgcagtcgattcttcaccagttgacttttccattcttcttgggaagcgcggcttaaaaagaaagtgctggaggttattcccagcactttctatgttgtaa

SEQ ID NO: 263 - DNA, 624 bp, Homo sapiens; identical to SEQ ID NO: 156

SEQ ID NO: 264 - DNA, 2915 bp, Homo sapiens
tttcatacacatatatacatctgaaactcagaaaattcattaggtaggaactctttggatgcatctccttttttaacctcattgggatgatttttcgttgcaccatcattttatagagcttcctagcactgctgagcatgcagaatttttgcaaatgcaatccagagaaacagacttgctatatactagctatttgaacttgtctgagcttatgtggcatggtctaaagaatactgaaatatttctggcatacctcttaattgcagtcactttctccaggttgctttatggattaaatgagataacctactaaaggactccagtaaaaagctaaaaaggtagctagcttttgaggtgttgtggcagactggcatctagtggccagcgataaaggtgcagactagtgtccacacctaagtggggacagtgcaggctgtaatgtccatacctagtggggacatcaatggggtatttgtcagagaagctccatggcatagtttggacattgtttctggctgtgcaggttcaaacccagagtctggctctcccaaagattatctgagttattctattattttacaaagtttgaaatagccattagatacccttacaaacttatcatttttgtgattgattttaagtctactgaaaatgtcaaaagaaatccaaaactgattgctagtaactaggccaggtgtggtggctcacacctgtaatcccagcactttggggccggggcaggcagattgcttgagctcaggagttcgagaccagcctgggcaacatggcaaaactccatatttacaaaaaatacaaaaaattagccggacatgatggtgtgtgcctgttgtccccgctactagaaggctcagaaagaaggatcacttgagcctgggaggcggaggttgcagtgagccaagactgtgccactgcactccaacctgggcaacagagaccccagctcaaaaaaataaaattagtgttaacttgtactgtttagccacattcattaagtttttaattttaactctactatcgcacaaccaggaatgtacaagagatctggagcctgatttgcatggcaggaaggagaccacgtatttttgtttgggatgggttttagccactatcagagacatagtttgtttcttaggggttcggtcccagtagtatgatacttagttcatttaggaacttccttttttaacggctaagaaaacattttagctactaaatgatatgcaaagataactttccaaatttaagctgtactcaaaaatccacagaatctgcaaaactctcaagtttctatatttaaatagaaatgtgtgttgatatacatactttaatcagtcatttcttgctttcaatatattttattctgacgaagttacaaaagtagatacaaaatactttttttagaagtacagttaactgacttagaaaaatagataaagcccctaaggattttaaaacacaacataaatttttatgtaaagaacatttaaaaatattttagatggtaaccaaaactaacttacacaaactatttttgatgtagaatagaatgctgttctataataagaagtctgtagcacactggtaatccatttggatctacagaatacttgtttggaacagaatctgataatgagagaaaactcaaatgaatgtcagtgcagttgcttcaaaaaaattactgctaccacatgtactatcatcccccaaggccttttacagtctgaaatatcaaaattgaaagcaaaaataggatgaccaaaggactactattttacctcttttcagaactctacaatagtagaaactaaattcccttatggatctcagggggaaataatgtgcctgttgaaggggctcagtgtttggtgtccaggctggcatttttcaggtgagggtttcatactgacaggaggcaggctcctaaaacaaggcggtagcaccagcaccatgactagggctgctttaaaacaaatttctaggacttacgctctttgggcctgatttgttaatgcttatgaggtaatgatattatgtttgagaagctctacttctagtatacctcaatgctcagagagaaagccaacaatacaatcaggaaaccacaatattgacaaaacttagtactaccaccaagattgttcctcttgccttggcactactaaaaaactttacctttgttactaaagtcatggtgaatacagattttgcatttctcatgtaagcagctatataagctagggttctacaagccttagatgaaaggaaaaactttgctggaagccctgtaaaaatcactttattcacaatctgaagaatgaaagacaaatttggctgtcaatacaaaaactgtagtacaagtgttttttgaaggcctgaaaattaaagcaccataggattaactgcataatttagcaagcactctctaccccatgactgtaatcatgtatgaagagcagagatcagacactgagaggagatggcttctgattagcaagggggaagggagtgagtgttatggaacaggcaaaccttgggcatggggagataaaagtgagaagagtcaaaaagattgatttctataggccgggcacggtggctcatgcctgtaatcccaacactttgggaggctgaggcgggcggattgcgaggtaaggagatggagaccatcctggctaacacggtgaaaccccatctctactaaaaatacaaaaaattagccaggcatgactaaaaatagaaaaaattagctgggcgtggtggcgggcacctgtagttccagctactcaggagaggctggggcaggagaatggcatgaacctgggaggcagagcttgcagtgagccgagatcccaccactgtactccagcctgggtgacagagtgagactctgtctc

SEQ ID NO: 265 - DNA, 1171 bp, Homo sapiens
caggtgtgagcctgtgtccagatgtttatcgagtgccagacatgtttcaggtgctgggaatacagcaataagcaagacagacaaaaaaatctgcccacataaagtttacaagaggaagaatttatgaaagaggaagatacccaatgtattaggtacaggatttctccatgttgcccaggctggatatgaactcgtgactcatgggctcaagcaatcctcctgccttggcctctcaaagtgctgggattacaggtgtgagccaccgcacctggctgccacttggttgttttaaacctgaactcagtggtggcccacacttgactaccaagtgtgatatgtcagaaattccttgtttgtgggcggcaagccacccaggtgcccaggcaagagactgaaggcacaagctgttccagtataataaagaaaataattaaattaagaaaagttatactagaaataagatataggtatgattattattaatcattagtttgtagtattactttgttctattattataataatctctgttttataattataacctagaaaaaaccaggccatacagaattaggagctgaagggacactgtgagagatgactagaagacaagagcgtgagccctctgtcatgcccagataagggcttcttgagagatccttggtctagtggtagcgccagtgcctgggaaggcacccgttgcttagcagaccttggtctagcagtagtgccagtgcctgggaaggcacctgttacttagcagactgggaaagggagtctccctttctctggaagagttagagaacactctgctccaccagctcttgtgggaggccaggcctgcctgcagtcatccggaggcttaaacatctccctgtggtgctgtgcttcagtggtcatgctccttgtccactttcatattctgcctgtacgcctggctcctccttttaagttcttagaagatagcagtagcaaaattagtgaaagtattaaagtctttgatctttctgataagtgcatagaagaaatgctgatgtatgctgcctttcctctctccctcggctacctgtcgggtggacacgtgacttgcgtgaccttatcaatcatttgagatgactcatactccttaccctgcccccttgcctagaatacaataaatagcagcgtgtcc

SEQ ID NO: 266 - DNA, 264 bp, Homo sapiens
atccatttaggattttaaaacaatctatcacctatctttgaccatatggactaaaattgatatccaccaatagacactgatgcctgcaagtcaacagcataaagagtggtaaagtcagtgctgcaaaagatgaaatgtttttaatgtggctttgatatcaggatgatgctggcctcataaaatgagtttgggaggattccctctttttctatcaactggaatagtttcagaaggaatggtaccagctcctccttgtacctctgg

SEQ ID NO: 267 - DNA, 1054 bp, Homo sapiens
ccggcctcccgggacccggcacctctagccagggacgcgcgctcggtcccccgccgtgcgcccccggtcccgcgcccaggctcccgcccctggcctccttaccagccacttgtcgcccagctgcgaactggagcgggaggcggcggccggagggcccaggacagccccgggagggcggcgaggcggagcaggagcgccccggctccggccacattctcagagtcaggaaaaggggcgagaggccacatgtctccctctcgcccaactgaaaacgaaacggcgctccagcagattgggtggaaagagctgggtctcttttctctgtttttcacgctagaaagggcttgtaaacattgttccttttaaaatgacctaccccaggcatttgtttgggcacacttctgtcctggggtcatcgttcctaggtggcttcggacctgggacttttcctgtatctgcacattgtcgttttatacacaattgccaaggtgggactgctttcaactttactgtgcttgaagctgcaaaggttctgccctgatgtttcctggaataatgctgaggactgcctttcgggtagccgccctattcagttcacttcatctcggaaatacctgacccctgccttggatccagcggccctcctgagagctgaggaaggaggaaatcctatgtgtctgctcccggagctgccacaacccatcttcccacaactcggaacttggaaaaaggaacccaggacacgactttgcttttcttttggacctagttggtgattatactctgtctcccatggagaccacgtcttgcatccttccttctatatgggatttaggatagaaattaaaaagaaaacatattattttgagtcttgatttggagaaagaagtcacagcttggaggaaaccagtttgcactatttgatgaggaatttggccaccaaaccactgatactttcccaaaggtttggcagaaattgttttttgagtggctcaccagagtacccagaagaatcagtatggaattagaggacagtggcctaccctaaataaag

SEQ ID NO: 268 - DNA, 571 bp, Homo sapiens
ttttttccttgaatgtgaacacatgagtgaagcatacatccattgtccatggggcaagaaacatgaggatgaaaagccaatatgttaaggacatgaagtgaaaagcgggaagagcttcttattcatgttatcactgagcagcgggaactgggggctctgctcattatagttgcccacggcctccagtcaatgaaatttccggccaatgaaatgctctactgtgactgaagcagcaaagagaagatgttctgccggaggcctctccagattgtgatgcactgggagcaagccaccatgaacatatcctcaggtctccagtcttctgccatcgcatgaaaaatggagcttgtcaaacacagagcagagctgaactttctgaattccacaggacagttcagagtgcttggaatgacacccacctgcaatttaaacaaaaaagaaggatgagtaagtgaggagctaaaaattgcatgtttccctaaattagatttatttgtaagctttaagtaagtgcaaacatatttcgaattatctgttatgaattgtggttttgttattaaatagacatttt

SEQ ID NO: 269 - DNA, 1415 bp, Homo sapiens
aagcgagcggactggccacagatcatactaaggatgttggacttcatcctgtggtgttactggaaccataaagactctggaaacaaagactcatggcatggtcagatctgcacttaggagcagagtggaggaaggatttatggctgcaaaaacagtaggaaggtcagcttgaaaaatactgaaggaccctctcagttgaaagatggcaaggcactggcatggggggaaagaacagattcaaaatatagaaaataagatcgacaggacttgattgattggctgaggggttgagaggagagaatgagggtttagggtgactctcaggctcctagcttgggtgactgagtatgtggaatggagtgttccttctcaaaactctggaatagccttcatcaaatattcgtggcctgcaaatcctttatccacaattcctaaatttaaaaaaattatgaaaaccaaaagcttgaccgggtactgtggtttatgcccttaatctcagcactttgggaggctgaggtgggtggatcacctgaggtcaggagtccaagacaagccggccaacatagcgaaaccccgtctctactaaaaatacaaaaattacctgggcgtggtggcgcatgcctgtaatcccagctactcgggaggtggaggcacgagaatcgcttgaacctgggaagcagaagttgcagtgagccgagatcgcgccatcgcactccagcctgggtgacagagtgagactcggtctcaaaacaaaacaaaacaaaacaaaacagaagaaaacaaaaattaactgggcgtggtggcgggcgcctgtaatcccagctactcgggaggtggaggcatgagaatcgcttgaacctgggaagcagaagttgcagcaagctgagatcacgccattgcactctggcctgggcgataaaagcaaaactccgtctcaaaaacaaaaacaaaatctttttcataacatatttgacaataaaacctaatctgaactgaatttattttgtggcagaacctgacctaaacttacataaggttatttatagttttcacttttccatctttcacttaccacagtatgaagtcatatgtgtcattccagaaatattaatttgtttgattactgggtgctgtcctgatgcattgggattgttgctttatattttgtatatgcaccatactatctttcaaaaatccaaaaaattttgaaacacattaaccatccagatttcccaccccatttactcatcagtgttggcctgagttcttttggctatttgcataaatccaatccacctgcagataatgaatattcattgcattgtgtgttatagactctgaaggagattcttgttgttttgagcagtgtcctcattaaaacaaagctaaaagcttcttgaatgactatcttgaaa

SEQ ID NO: 270 - DNA, 709 bp, Homo sapiens
gagctaatttgttaagtatacttgcaaaaggtagatgaggagacagataaaatcttattacctctttcagatgagaggcacttgagccctgctcagctatgagaataagagaggggaattaattcgaattgaatacacttgttctcttatagctgttgttccccaccagaaccaaatgagcgcaagatctgacaaagaaaaaaaaggttcatcttttattcccccaaacactttcatttaaatcaagaggatgggatgtggttattgctgtgtttttagacagaatcaacggtttctgtgtctgagatgttgcatacaccctctcagtccctctatcctgagatggagtcacctgaggatccacagcaagtcctaaccagggatgggtctgggtgattaaggaaggttggcttcagaactgggccaggggcactgctttgcttttgctgttttgatcagctctctgcctgcaggagacaaggaaaaccaatgggaacagcccagtaaaggctccattccccattttacagctggggaaactgagttacagagcttttctgcactgagtcatcaggagcaaatgctagatcagatagggtctctctctctgccacccaggccagagtgcagttgacgcagggcaggggagccccgaagtggagcatagtgtgtccggaactggtgggttcttggtctcactgacttcaag

SEQ ID NO: 271 - DNA, 233 bp, Homo sapiens
acagggtctggctgttttgcccagaatggagtgcagtggcgtgatggtctcggctgacagcagcctcgacctcctgggctcaagccttggcctcccaaagtgctgggattacagccccacctgcagagtcaagtccctcctcccacctcagcactgctagaaaagagcttcaggatggagccacacatgtcactcaagcccaagggtcagtcaacagcccacagccctaaatt

SEQ ID NO: 272 - DNA, 3506 bp, Homo sapiens
actcacctggcggctgccacgcgcccccgcccaggatccgaggcctggggcatctgaatgaggaccctccacccacatttccacttgggagcgagctccagtcggggaaagggcctgcagcccgcctcgtccccaccctgggaccccgcgccccccagtcccccactcccgcgccgaaggcagggccgcgccctgagccgggaagtcgaggggatggaagggaaaggagccaccggtgagggtcccccgggttctgagcctcccgcgtcgggatccgtggggcgcacagagcgccacctccggccgaggcgcagctcagagcgcgatgcgggggaggaacgcgcgcggaggccgaggtctgagcgtggctagacggctcccacgccgagaaagggcgggtgcgcctgggctggatggatttcgcctccctagaccaggagggattggaccctgactacaggtccaggtgctcgtcagtgccctgccagggggtctacgcgtcctggtaccgggtccagcggggtggcgtgctgtgcagaccccgaggctagacggcctaggcccctggagcccaggagacgcttccttgggtgagcagcggagaatcccgcccggcccagccgtcacccccaaccctgtcgattaaacccctgcccccgtcgcggtcgccctccctccagacaaaggccgttaaggcgcagccccgcgggcggtctttcatccccagctaggccagctctagcatttcaaaggccgaatccggagagcgcttcgggggctctccccttcccccaaatatttggggagcgacgcctctccctccgctcccagtgggtcgcgtctacacgcgcccttccacacacctgcaggccccctccccacgtctctcccttccgttggccgcagccccacaccacgacccccgcggtcaagcatgccctctgggtggtcaggaccaagcgggaccgggacagaaccaggggagccttggaaacgtggaggagccccttaaagccaggccttgtccctccagggggaacttgcggcttgggaggggacacccactgcatggcttctggaaagagccggactcgcagggccaggacgcaggccggaccccggcctcattcttcggccagttatcccggagtggcgcgcatcctgtcttcctgggcctcggactgctcgcgcgcagagggggcccgaggacacctctgtggggttagaggactcggtaagacggtgtggaaggcaaggaggaaggtcgcgttgtattggggatggggtacccgtccctcccagcttgagggatcctgggggtcctcgccgcctctgagggcctagatggctgcttccctcggctcccctgcccggcctggagctacgggtgcgcccagctagagtttagggccacctggggacgtgcaaggggcgctggagcgaggcgggggctggggcggggcgtgggtgcttcacccgcgggggacgcagagcttaggcgaaagcggtgcaggcatctctctaatcgccggccgctattaaaaataaaaccgcgacccgtcgccatggcgaccacaacaacagcggccgcgcgagggaggcgaaaacttgtgcagccgcgcgacagccgccttctggggagactcggggcacgacgcacccggcgtgggactgggacccccctgcccggccccgccacattctccgccggatccccggaagacacaaggagacgtggacccccacaggcttttttggggggattgggcgttgaaaccgcagggctgacttaaccaagaggtcaccgacttggataaaaaacccacgcccgcgcggacccccctccccggccttcgtttccattcaaactcccagcgtcctcattgcagcccctggggagggggacggagggacgaggtgggtttcaggtgctcggcccaggaggggacggtgcgacccgggccccgccggcgggttttgcgcgcggaggctgcggcacctgccccgcccgccctgccgcgatccttgcagacgggggcggtcacatgcttctttctggccaggaatcgagtttcacttccagccgctattagtcggttcacacagttcactgcaaacatttgataatgaggctaaatatactcccgcgtcggaggaggcgtgggcgtccccgcccaggcccgggagacagaggcgctgaccccgggacagagcctggctttgtgcgggaggcagacgcgccccgcgcgccgcccccgaaacattcgcaccccatgctgaggcgcgcgtctgggagtccgtgggcgccccgaggtgagcccggggcccctggcggaagcagcggggagctcccggcgggtgcggggaggtgctggtgggaagcaaggtgcacctggcggcctgggatgtccggtcgcccccggagccggtgcatccggcctctcccggcgcgccccgacgtgcccgcgggctcataattaccgtgagtcaggtgccccaaataggccgagcgaggggggccgtcgcgcagcaggggcgggtggccggacgtctgcccgggactggttgcctcccgcccctccccaagaccctggcacccagggagggcgggaaaggccttggccattcctctgggtaggggactggagaggggaagaaactttcgccgagtccagcgctgccccctcatacccatccccacccaggctgcgtgtccggggcccctccggggcttggcaccagcaggcacgcagcgatcgccgtcgttgttatttagtagtagtagtaacggctgacatttacagcgacgtcgatggcgccaggtgccaagctctttccttgtataatttcatggacactcacgcatcaactctaagcgaagacttggagcggggctcagcaccccaggggtacctctgcaacctcgaaatgaagttgaaaatagcacaggagcccactatcactgtgtgaacattttgtgaatgaagacatgtatgaaaggatgtttggaggcttcaagaaacgaaagccgagagtctagctagaccagagccatccagcccaggagcgatggccacgtgtggccgctggacacgagagacgtggccagtccaaactgtgcagtgcggggcagtggaagccgttggagggcctcaggcaggaacacaaggtgtcgtggcagaaaggaagaaggggccgggcacggtggcccacacccgtcatcccagcactttgggagggaggccaaggcaggaggatcgcttcaatccaggagttcaagatcagcctgggcaacacagcaagaccccgtctctactaaaaccctaaaacttagccaggcttggtggcatgtgcctaaggtcccaggtcctcgggagactaaggcaggaggattgcttaagcccaagagtttgaggctgcagtgaactattatcacaccactgcactcagcctgggtgacagagtgactctgtctcaaaactaaataaataaacaataattgtgtt

SEQ ID NO: 273 - DNA, 371 bp, Homo sapiens; identical to SEQ ID NO: 157

SEQ ID NO: 274 - DNA, 572 bp, Homo sapiens; identical to SEQ ID NO: 30

SEQ ID NO: 275 - DNA, 205 bp, Homo sapiens
cacttggtgagagtcttcacggaccacagtgttgcacgaggtgattgtgtttgcagaggtttttttgtccttgaagagcacttagggctggagagcaagacacatgctgacgagcagaagctgacaggcttgctgccatgtgggaaagtccttggacgagttgtctgcttgcggagaggtgtctgcggctcagatttgtgggaag

SEQ ID NO: 276 - DNA, 878 bp, Homo sapiens
cgtccatcgcccttgccgcccctggggccgcgagcgtggccttgggcccagggtgtcccggactcagcactgacgttcccggaaagagcccacgttgagtaggagctgagacctgcaggacacaggaactcctcccagggtcctggatccagctgctgctcacggcaggaggcccgaaaccagaaggcctgagcacttgccccgtccccaagagatgcacagaggctggaaggggcagtgcaggggctgaccaacctgctcatgaaaggagggtccagctgggcttcctgggtcgagtaggggttcagaaagctgtgaaacactcatttcctgcatcaggacttacttcggtcctggatgaagagtactgaagatacatgcctaaaatattcctaacaccaggatttgtgcatgtgtttccttccccaagaaagctataaacagcaaaaattctgctgtaagcttccctgtgtcctctctccctctcttccttccccctcccctaaaactaaaaggaatgttaaaagaccctttttctgtgaccagcggaccttatctatgctcccaattccaattccttgtgaacatactttgtaaagtcctgtaaaatcctgtctcttttgccatgctgctgcaaggtcataaagtagataaaattagataaaacctaagttgcaattctgtttttcctcaaaatctaagacatgtcacaaaataatttactgcctttgtttctctctctggtaacatcttcccaccacatgtatttcccgccttaaagagattaaaaggcaatcacccaaaaccaacagtggctaccctctccggaccccttccatgctgtgtaagctttgtactgtcactctgctcaataaaac

SEQ ID NO: 277 - DNA, 418 bp, Homo sapiens
ggaacagagaccaactccgtttcccgatccctttgcaatctgcattgaaccatgagtcaagttcttgataaaggagtgaaaatggtaagtctaaagcaatgaaaagctgctgtattgactacacatgccttcatttcttctaccctgcttctttcatgcctgcttatctgaatgacaccaggatgacatttaaggcacatctgaagatggggaaaccacagcacagaataaggctgggcccttgaatcaataaatgaaggagaactactcaagagaacaaaaccaccagcaatatccacctgtatttgtcttttcataatgtgtgacacatgtgctcatggattattgtccgaagcaagacatgtgaccaagcctaacatcaactgggtgaagagctatatgttcctttctcaagagg

SEQ ID NO: 278 - DNA, 291 bp, Homo sapiens; identical to SEQ ID NO: 172

SEQ ID NO: 279 - DNA, 6675 bp, Homo sapiens; identical to SEQ ID NO: 88

SEQ ID NO: 280 - DNA, 239 bp, Homo sapiens
acaatccatgttccttttcttccaacccaacagatctgtggctgggcagcagctgctgagctcaactacaattccagcctgctttacagttaggcttgtccacaggaccaagttctcagtgacagaatctcatcccatcagttgaagaccttaagagaaaagagactgacctgctctgagcaaggaggaattctgctggccaactgcttgtgaactccaacttgtaatatcggtctcca

SEQ ID NO: 281 - DNA, 451 bp, Homo sapiens
ctcatctattcatctatttttggcctaagtgcctttggacacttcttcggaaaagcacatgaactcttcggagtctcctgttccacttggtaaatttcctatagccacgcactgaaagtccctgctgccctccttcctctgagcttgtggggcccacagatcccctgctccacttcctgcttcatttcagctgatggatgacactccctcgttctaataccatctgaatgcctgagcaattacatcttacaacctcatgaaaaacacagcagcttgtcacgatgaatgatgttaccgtgaataatgcagttttgagttcaaactccttcttattccaagaatgagtaaatatccctattccctcccctccccattgcatttgggtttgacatgacatgaatcattgtggttttactcctgggtagaattgtttttctgtattgcattgcca

SEQ ID NO: 282 - DNA, 387 bp, Homo sapiens
ctgcccctcgttctatcgcagccaatccgacctagactcgaccagtcttgcttggaaaccgagaactccagatcctgcgccttgagcacaaacaacccactgctatctttctcctcacttggttcagtattcctggaatatttagctgcatgacaggatgaagatccacaactaaataccatttagcattgatggttcagtaccgtggacagcagcactcatgttgggaatgggccttactgaaatcgcagagtgactttgtaagtttggtatatcacagaataaatttgttggcgtggctacaaatggataaggtgctggccagaatattaaaattcatggccgaattaatttttttttcttcccttcatggaggggaggaaaaaa

SEQ ID NO: 283 - DNA, 2110 bp, Homo sapiens; identical to SEQ ID NO: 185

SEQ ID NO: 284 - DNA, 1243 bp, Homo sapiens
caccagaccacaaacgtggatggagtttcactcttatggcccaggctggagtgcaatggcgtgatctcagctcaccacaacctctgcctcccgggttcaagtggttctcctacctcagcctcctgagtagctgcgattacagatacatagctctggccaagaagtgtggttttgaagagcccaaactgtatctgttacctgatttcaaagaatattccacctaggagagacccaggtcctgcagacttcctctggacacttttggcagtcattgttcccagctgattctgcaacagatgaaggacggaggatagaatcatgaatagcaacatcttaattgctgactgggtgttgattctaaggatacccccaataaacatctttcgtgctaaagcccattccagaatttacttcccagctatctttgatgttcatattgtcagaggtggtggccgctgaaacaggcaaagacatggagcatatcttgggtccaggaccttgggagtccagaggaaggtctttttaccatcagcattctctactgtgttcaatgactgtcagccaaagatggccaggttctctactgtgatggtgaattttatgtgtcaatttgactggaccatgggatgcccagctttccttcagaaagaaatgcattcaaagaacctacattcacaacataaagaaataaagcctgcacctacagatctacacacatgcccatgcacatgcaggaagtgttcatctaagactggaccttttagaagaaagctggcatacattcgtgaaggcatgggcttccaggcatgtcatcttcactcacgaagcacacacaagaccgccaagcattaagattctcctgtggagccaggctacaatcctttaaatgaagacagacagctaggtggctgcagcccagcgctacacctcacccctccctcagtgtcatgcagaaaaaatgtattcagaactcagaagtgaagttgtgcaaatccatcattgacactagcttcaaggttacctcgggggagcagaatgtacccctgccagagagctggatagatgatgatggggacagaaattctgggggagttgtaaatggcagccactgcctctataggaaacccaaagggaacacagcagaagaggaggtggtggaggagccactgccctctcgaagggttcaatgtcattctgcagacacaaccaaataactttttcttccctgctgctcctccatttg

SEQ ID NO: 285 - DNA, 1067 bp, Homo sapiens
acccagcctggatttaaactcttgggaggagctagaaggcagagagaaagccactcaggacttcccatcccagaagataaaggtgaggaaagcagcagcagcagccacaggccagtattccagagcagctttgggttcctgtcaagacctgctttgagaaggaggtggctgtggggctggagggctgggcctgttcctgagctggctgctggcagcacagcaatgaggcaacattgagaactgcgacacgaggcccagtcctgctactaaaccaactgtgtggacttgcatagtcacttcacccctcgggcctccatttctccactttggaaagcagtgttgggacgatgttaagggtttgcaaccttccaacatgaagacttatttttaaaagcaaaacatttcaaagagtccacatgacagtagtgttcattttggcatctgttgatttaacaaatacaaaattaggctgggtgtagttgctaacgcctgtaattccagcactttgggagaccgaggcaggaggatcacctgaaatcaggagttcgagaccagcctggccaacatggtggaactccatcactaccaaaaatacaaaaattagctgggcttggtggcacgtgcctgtaatcccagctactcgggaggctgaggcaggagaatcatttgaacccgggaggcagaggttgcagtgacctgagattgcaccactgtactccagcctgggcaacagggcaagactccattaaaaaaaaaaatacaaaattaggcatggtggtgttcgtctgtagtcccatctatttgagaggttaaggcgggaggatcacttgagctcaggagtttgagtttgcagtgagctgtggtctgcctgtgaatagctgctgcagtacagcttgggcaacatagtgagattccatctctagtctttaaaaaaaggaaaaatacggccgggcgcggtggctcacacttgtaatcctagcactttgggaggtcgaggagagaggatcacctgaggtcaggagttcgagaccagcttggccaacatggcgaaacccatctctactaaa

SEQ ID NO: 286 - DNA, 1825 bp, Homo sapiens
aagccggcgcaggccttcgcaagatggcggctggaggcaagggcagaggccttcagagcgttttctttttccctttcctcccttcctgcaaacaatgtggctacagtttaactggaagtgacaaactgaggaaactgaggcactggaagatgaaggctacagaggtagaaagtgatggaggagatacatccagaagactgcattacaatttcaaatcaaagctggacaagtttttttttttttttacacagatatcaccatgttagaaaagttggacaagttttgaaaccattctgaacctatcattcctgtctttcaaatccttccaaggcatcttattattgatttgtttctatattttcctcattattaaagaggttgagtatcttttctctagagctagtttgggttctgattttcttcactttcgtgatggagtcattttagaattgaagggcatcatagcaactgaggcagtgttgacatcatcaatgttttaggattacaggtaaccatatttcccagtttgcttgggacaaggccagtttgtacctcttgtcctagcatttttttttttttttttttttttgagacagagtctcgctctgtcacccagattggagtgcagtggcgtgatctcagctcactgcaatctccacctcctgggttcaagtgattctcctgcctcagcctcctgagtagctggtattacaggcacgcaccaccatgcctggcaaatttttgtatttttagtagacacggggtttcgccatgttggccagtctggtatcaaactcctgacctcaagtgacgccctggctcggcctcccacagtgatgggattacaggcgtgagccaccgtgcctggccctagtatattttttaatagcattgcattcaatctcaaaagtgtgtgagttttgatgaaaaattatatggtggtcatttattatctgaaatacacatcaaaataccactattgccattttgctctggtatcttcatcagtgggtgcaggattgtcatgaaggcggggggaggttgttctgcttccttctctgttgcatccccagagcccagaacagtgcccagcacccagtaagtgcttaatgaatatgaatgcatctgcacataaattcgtttcttggggcttggcacattgccacttgaacaaatggattctattaacaaggagtatggagcaatgattttggggtacacaactcatggcgcctgccaaaacatgcgctttagattttgatagatatcgtcaagttgttctccgcaggggttgagccagtttacactcccaccagcaatatgtgagagcatctgtttctctaaccttcacccacatggtgttatcaaaatttttatctgtgccaatctggtattttaaatttgcattttctttattatggaaagatagagcatactttcatatgtttaaaagccatttgaaatttctaagaactgtctgttcatatcctctgcccattttttttttttcagtgaattactggtctttttcttatcaatccataggaatacaaatagttgttccaagcttttcatgccttttgagtttgtttctggtgttgttactaagcagaatttaaaacatgtatttatatttagcttctttcgttttattgcatctatattttgcatcatgcttagaaaggctttcccagattgtaaaataattctcccatattttcttgtcttactttcaagttttcatttttttcacatgtaagtcttgatctatctgaaatttattttggtgtaagatttgagatatgaataaaatctaatattgttt

SEQ ID NO: 287 - DNA, 225 bp, Homo sapiens
gttcaagcgattctcctgcctcagccccctgagtagctgggattacaggcacgcgccaccactcccagcaggaaactgctcaacagtcacatcttgaaagtaacttgaggcaactgcaggagggctgcatggcgggaaagaaattgctgaaaacaggctgggtgagctggctcgtacctgtgatcccaacactttgggaagtgaagttgggcggatcacttgagg

SEQ ID NO: 288 - DNA, 811 bp, Homo sapiens
agcccatctgcacccaggcgctcactgaaacagtgtgttgctccacaccgccttgttttgcttgttggcgcgctctcagggttccgaccaatccaagagccttgcagaaagcattaacgtgcttttctctttggcagagtttttctttgctctgatcttggagacatccctctgcctagtggaaacataaggaatacagaaagaatgcaaggagatagaccaacgtgagattctccttcatgcactcaagagaaagatgttgcaggaagagctagtctttcaggctgggctggtgacctgagaaagaatgtccagcttttcttctccacttggcatatcaagagccaggcgtggaagactaaaacaggaaatgtttataaaaactgttcagcggttcgccaacaagaagtggtaaagtagcaaaaatggggatggagatgccaggaggaaagatgccaggggtaaagtgggaaaatgggaacctgaagccaggaggtcaagccaagccaacaggtgttctgtttttcaatgaggaggtggggcacaggatggatggaaactttccacagtcacagaactaataagtggtgctgaggactcaaacccggggaagcccactctagaacccatgctggtcatccatatccccaaggccctggtcagaacacagctaagcagatggcttgggtcatcaggacgtccattacatccaaaggaagacagcctgtgacgtttcaaaagcaaaagtcccctaccagccagtgaagctacctgatttctcagtatcttacgcccagtgacacgatctacc

SEQ ID NO: 289 - DNA, 347 bp, Homo sapiens
ccgggactttctgggaattctcagcagcactttttcgccgccacctccaaccaatcggactggctcttctgtcattcgggtcacctccgctgagatgccttccctgaccacccaagttgaaggaactgctaaccttttctcttggactttgttttttatttccttcacagtatttctcccctctaaaattatcttgtctgcttctacctatattgccttccctcttgaaacctaagttccataaactgaggcacaaattctgccttgttcatctctgttctcagcactctgaacagaacctggcatgaatgaggtgctcaataaaagttacttggatgaatcggcag

SEQ ID NO: 290 - DNA, 347 bp, Homo sapiens; identical to SEQ ID NO: 289

SEQ ID NO: 291 - DNA, 363 bp, Homo sapiens; identical to SEQ ID NO: 17

SEQ ID NO: 292 - DNA, 241 bp, Homo sapiens
acaattatttttgcaagttggaaaaaaatgcagtattaatttcatttgcaacaaatttaatagattaattaggagagaatagatatctttaaaattgagtcttctgtccaactgcaagttatagctgaggtggtaccagtttaagaagtgagaacttcttcactgactgaaatttgcatatcaatccaaatcattgtgcttatttactatttttgtagacgtcattcttcaaaagtgctgg

SEQ ID NO: 293 - DNA, 598 bp, Homo sapiens
gaccccaggagcaggggtcgcgccgaagagcagagtccgcggctggaaaccaggcaggggagccacggagtagtcacacaggttttctgccgcctttcaactggtcttattttgctttcatttttcaccagcccatgtggggtgtttaatgttgcacgcgaacgcagtttcttccgggcccggaaggcccacgcacgcaacaatgttgtgcaagtgactggaaaccacctgagtgtccctccatgggggtgggttgcccagcatggacctctactcctgtcacaatgaagtcgactgtttcgtcgagggaagtggccaccgttgataaaatgaaaagacgccatgcagaatactgtgcacaggaggaaaggtctgcgtgccctaagagagagctgctggcgtgcagagagaagcagagatgccgacgacggggaggaaacacactggcggtggtgaggctccttccagcagccacagccctggttcctctcagtctgtgaccctcccacatccttcccatctatgagagcctgtaaactccttttgcttaaccttgttttagttaaggttttaaacagttgccaccagtgtgccctaa

SEQ ID NO: 294 - DNA, 974 bp, Homo sapiens
gagttcaagtgcttctttataaaggacacttaactgatctaaatatttgtcaagctgaatcgctacatccactctcacctgcctgaaatcaatatgctcaagtcaaacgcatttgcctgcatctgaatgtggagaatgaacttcttaaagctgaactggcagctggaaggggagagagaagagctggacagggagccaggacaccggagttcttttccactgtggtgggatctggaagaagctgttgaatctctgtagagttagcttttaaatgctccttgaattctcaggcagtgaatgcactaccgtgtgcagaaggcaaggacatggctgagcatgttgttttcttcaccttatatggagcttccttaacaggttcctggtgctggttccagcagaatagacacagagatgcatggcctaactcccactccctcttcaggactgagccacgcagccccccatctgccagaagtgttagctgttgacggctcacagctgagtccctctccaggcattgctgaaaagagccaccttgctctaggatgtgcccccaccctgggggcagcatacattccaagtgattagtccatagtgtggtacaaaggttgtacccatcttgcctgaattcaggatctcttggaaaaccaccccagctctgcagctcctggtggggtgctgaggcctctgctgcagctgcatcgcagtttactttcccctctgcctagtcctgctgccttcactccccaacaggtattgttccccagagaactccctgcccccagtcacctgtaagcaaatctccactgcagtctgtggcctgggaaacctgctctaggatcccaaagtgaacacagcttcccattgaaatgtgtctttgggtgttaatctgtcctgccatctttacatctaatcaagaggtagagcttcccctggtgttcctgctgggtacataaaggatcttttccattgtc

SEQ ID NO: 295 - DNA, 375 bp, Homo sapiens
ctcaaactgttaagacagctgcagtttctaaagaaatacaaagattgccgtggatgcactcaaaggtttcattgttttaacacctttaagggagaaaaaaagcttcagagaataaaggagaatgtcctggagagctcagtgggaacaggaggaaggcatcttccacccacagttgttcttgtcattggagaagaccgctggctgctctgaagacccactgccttacatgtcacttttgctttttcaccaagagtgagaatttacttcctttgggcctagatttaaacctgttagttttctgtttgtcaccaagttcaattctgccattttgtccaggccaccttggttcttgtaatggtgtgtggcgctgctact

SEQ ID NO: 296 - DNA, 209 bp, Homo sapiens
gggcggtgctgctaaggattgaggtcgagtgtcaagcttgagctcttcagtcaatgctagaaatggacgtttagttattgaatcccgctaacgaggggagccaacaagagagggatgtcggcatcgggtgtgcggttccaagaactgattggctgtggagattagaagttaggaacctttgcaacggaaagcggcctcgggcaggcgcc

SEQ ID NO: 297 - DNA, 1615 bp, Homo sapiens
aagatgtgtcaagtaactagaatgtgcctggacagatactgtagaaagcaaaaccataaagttgttcatgagcttgtggacgcacctgccagctgtgaataagtggctctaatcccgaacaacttacctaaaaagagcctgagagctgaactgtgcaatggcccactttccagtcctcactgaccactgggttgcacacactttggagatctctgaacagcagtgtcaaggctttcaaatagagttatctttgaaacgacaacacatgaaagtctggttggtacttggagcttaaatacaaggcaattgtgtgcctgcaaaaacaaaaatagcaatattatccttaagatttcaacaagacacagtgtctcatcacataatccaaagaagtccaggttacaagccccacaatattcagcattatgaaaaaacagggagatcttaattcacatggcaaagagaatcctcgaataacaatattgagaggacacagatgtcaaaatcatctgacacatacattaaagcagatattataacaatgctcctagaatcggggataacattcgtgaagtgaatggaaagttggaaagtctcaccaaatatttcgaatacataaacaccaatttaaacttaagaattaaaaaaatgtattaaccaaaactcttaggggaaataaaaagcttaattggaggatctccataatcgaatgcagaagactaaggaaaaagtcaatgaacttgaaaacagaacacgaatacctacataatctgaactatagagagaaaggaggattttattgtctctgaacagaggctcaggcacaaataaaaaataacaaatccaacattcacattattgtaatctggaaagaagaggacaaagtggtctttgtgggataaaactttgaacaattaatagctgaaaatggttcaaatttgtcaaaagatataaaccagatttttaaagttcagtaaatgtcaatcaggataaacccaaagaaacccatagcaaggcatatcataatcaaactgctgaaaactaagaaaatacaaaacaattttgaaagcagccaaagggaaatgaaagagaaactaccaaatgaatgattgtagatttcgcatcaggaaccataggggccagaaaaaatgtcataacattcggtaagtaacaaaagaaaaagacatatcgacccagaatgctatgtggagcaaaagtatcttccagacataaaggcaaataaatgcattctcagtggaaggtaagtaaatacattctcattcttaggaagactgctggaaaagaattagcaaagatttgagataagaaaaatgataccagaaggaaacttagaacatcatcagtgaaggaacaaaagcagaaatagaacatgtctgggtagacataacagactattattcttcccttgagttccttaaggagactacggaaaagaagagtgactaagatctctgaagaagggaaaagctagatgactgggccacaagaggaaaaaaagcagcaagacagagatttgttggtgccaactaaatgagcccaacagccagtgacaacagaactgcactaaaaaaagtccctcatcagctcttgagagcag

SEQ ID NO: 298 - DNA, 647 bp, Homo sapiens
ctggtctcaaattcctgggctcaagtgatccttctacttagggatcccaaagagctgggatcacaggcgtgagccaccgcacctgaccacacaaagagttttgaaccaggaaggaacctggagaaattatgcagcagtggacaaggtgctgtttataaaccagcccagctttggctcaggacaagccacccatctccaggggctggcgtgtgtgcctctgctgaccgcagctgctgacctgtctcctgtacactctggatgctgtgatgcccagacagcaaaacttcttttcaggctccccaagaaggcagggaccccagttctctcaagagctaacattagagcaaatcagtctcaagagggagtcccagaatcaagaggaaatatgggcttgctccttgatcctggagtagagcacatcttccctgcctgcatggccatgctgtgaatctgcagctcagaagttggtctccctaatgccacactctggaaccatgtcagccacatgattgtggcttcccgaggccacggcgtgtgcactctgcctgttcatgttgtgttttcctggtgactccttcctttgctattcagtaataaggctgatctgccatagcaacgcccacagccaatggcacctgcacagtgcg

SEQ ID NO: 299 - DNA, 2051 bp, Homo sapiens
catcctgcagcctcagcttctgctccttgctttttgtccttggtggtcatatctggggtgggctttggaaaggttgatctttctgggggctgtgccctttattcgctctcttcctgctggtgcagttttgagggcctgggagttgcttaggggttgaatgattactggcttttgagggtaagcttgtgatttatttggatagaattcccttaataatttagtagatttcctgtttatttgcttcccatcagttgcatgtgtaagtaactactgccaaagatcttgtttccatatagtttccaaaccgaactctgtgctctatgcaaccctcctctcaatagtgaccttgaagttgtctaaaacaacaggctttggggataatcctgggtaatcttaccattcctaccaggctagaacatgtcatctgctagggatcccgtaatgaaagatttttgagcagagatttgggaccaaagttttatatcttgctaattccaggacttcaagtcattacttaaaactgcttcagtttggagtttaggagaaattggtttttgtttgtttgtttgtttgtttttagccctgtaagggttactaaactctcagtctactaaaattgaagactacaagcagaaaatgttcctcctggagaagctgtattcccttccaagggcttgcagcccatcccattgtaaactggcggtcatctgtctcttgtgggtgttgttaagactggtaatggcagccaacacacccacattctgactgtttctgaccattttccctaattccttctctacttattgagtgcgctatttcctttcttttcttttcattttctttgaatccctcaacagtgtccatgtcttatatttgtccccttcctttccacagtcatcctctcagctcttaatctgggtgtctggttaccagttcagaagccgaataacgagataggcactgccactccttatgcctagaggcaggggtggggaggaggagaatgactgttttgtggaaacccccaactcagaaccgcacagatgccctgcagttccacctctgcatggtagccaaagagagtcctctaaatgaagcaatctctttgagcctctcagcatccccgcacttccagcatcactcaacccagaaacaatagaatctacaaggggactccctacatgtttcttatgaggtcagaattgccatcctggaaaggtgagttacagtgctgcccaggtgattcttgtgtgttactctatgttatatctattgtataatctcacatttaaatagcaccattccttttattgcaatgcttatgaaaactttccttgtttttaggtttccttcgtcagtccaggcaggactgtgcggttggaaaagggacggatgctggtcctggaaggggcgtcgttatctagaagctcccaacctaagtgggtgactcatagggagggcaaggagagaaggacacagcaagcaacttacatgtaaaacaagacgtgtgggttattatggaagaaattcacaaccaaacttggggttagcccgtattgttttccaagaactctatgtggacagtgacaaaaaacagacctaagaactagcagactgggcaaagctttttcacataacaacaacaaaaaaagcaattcctcaggaaaaaatggtcaatgggtcattgtgtgtagacaaaactacaagttctgctccagactctggggaaaccatgctgccatcttcaagctgtggccattctgtaatacagactacgctaaatcacatgttgtcatcaaggcagaatattttgttcctttatgggtcagcctgggatacaaaattagagaaactttgcaatgaaaaatcccttgtgtctcattgaactttttccttaattcaaacctttcctttcacagttttgattagtgcctttgcccatgtggacaatattttatgatcaggttttaagagtaatccatccatggctgcttggctgcctggaacttaaaacaacgacaacaacaatgtccagataaacccaataaaat

SEQ ID NO: 300 - DNA, 2207 bp, Homo sapiens
ttcagccctcaaatattgattttgaacattattttgcaaagagtactaagtggttggttagttgagatagaggaatatgcagcttttgactatctttcctttcccgtcagtaccagctttcatgatacaatttcctcttatcactttggtcaagaggtggggcagaaaattttgagttacagtatcattcgaagagaatttatttctgcctttcatgttatagcccctaagggatccaggacccgaaaggccagcttctccctcattttgaaatcagttttctccacctgcaccactgcatagcacagatacagaaaccatcctatttcaggatttgaatgcaaaacttaccttcttactctaaagatgaatgatcagggagagatttattcaaccctgagatttttgcagtctccttcagagtcacagaatagattaaggcctgatgatactcaaaggcctgggaaaactgatgacaaagaattttcagtgccctggcacctcattgcagtgactcttgggatcctctgtttacttcttctgatgatagtcacagtgttggtgacaaatatctttcagtgtattcaagaaaaacatcaacggcaggaaattctaagaaactgtagtgaaaagtacatcatgcaaaatgacaactacttaaaagagcagattttgacaaataagactttaaaatttgacgttctcaaaaatagctttcagcagaaaaaggaactggattcacgccttatacaaaagaacagatgtcatagagaaaatgagatcgtttttaaagttttgcaaaatacaggcaaattctctgaagaccacgggtcctgttgtggagtaaactgttattattttaccatgcagaagaaagactggaagggatgtaaacagacttgtcaacattgtagatcatcccttttgaagatagatgacaaagatgaactcgtattttacattcacttttattctcttggactctgtttctcaatgttggacctaagatattgaagacaggctggagcccagagccttcattcaatctcagatttatgaaaataattactggattggattatcatatgatgaaagggaaagtaagtggaaatggattgataatggcacatctcctggaattaattctacaataatgcgtttttcttctgggagaggagaatgtgcatttttgacctcaacaagaatggcaactattgattgcattcaaacgtacaattgtatctgtgggaagagaatagactctattttctctgattcggtgtgcgccaagaagaaaaggtgaaaatggaatgttttctttttttgtttcccataataatttctgattataaatcattgcttttaactgtgggacttagttaattcttcaaaagataaagatgaacaggaagaaaaagaaaattattttggactatgactttaaagatcagatgccatctttcttcctggagaagaggagattttctcttttgagagtggttgttccttcctttaatgtccctgaggaattattcattctttctaattctcagaactacctatacaaccagttagagaactctgatattatatcctgggtcttttttcttatcaataggataaatcattccagcatcttctggttttgaaagcagttgtgaactagaatgtagttatttttttcttcccatctagaagttacctcatcttttaaaacatttgttttgctacaaaatataacttcaaacttactgaaagttgcaagcatagtacaaggaacttctatataacctttactcatacttactagttgtttatattttgctctgctttatatttctctctttctatcttccacttaataataaattgaggacttcatgtccctttgtctaaatattttccaagatcaagggctttgttttatataatcacagtgcaattatcaaactcaggaaatttagcattagtacagtactatgatctaatctgtaatccatgttcaaattttgtcaattgtcccaataatgccatttatgtgtatttcttaaaaatccatgttcaggataattcaatgcatttgattgtaatgtctctttagtcttctttaatctgaaacagttctttaggctttttcttgaccttgacattttaaaaattaactttattgagttatacttttcatgcaataaaatgcactcacttta

SEQ ID NO: 301 - DNA, 1599 bp, Homo sapiens; identical to SEQ ID NO: 72

SEQ ID NO: 302 - DNA, 1906 bp, Homo sapiens
gtttaattggctcatggttctaaaggctgtacaggaagcatgatgctggtatctattcggcttctggagaggccttaggaaactttcaatgatggtggaaggtgaaagcgtagcaggcacgtctttgcttttttttttttttttttttgagatggagtctcgctctttcgcccaggcggaagtgcagtggcgcgatcttggctcaccgcaagctccgcctcccaggttcacgccattctcctgcctcagcctcccgagtagctgggactacaggcgcccgccaccgtgcctggctaattttttgtatttttagtagagacggggtttcaccgtgttagccacgatggtctcgatctcctgacctcgtgatccgcccacctcagcctcccaaagtgctgggattacaggcgtgagccaccgcgcccggccacaggcatgtcttacgtggctggagcaggaggaagtgtggggggaggtgccacacacttttaaacaaccagatgtcatgcaaactctctcacaagaacagcgctaaggggatagtgctaaaccattaatgagaaaccgccccatgatccaatcactttccaccaggtcctacctccaacactggggattccaattcaacatgagatttgggcggggacacagattcaaaccatattgttccacctctggtctctcccaaatctcatgtccttctcatatttcaaaatactaccggctgcgtgcagtggttcacgcctgtaatcccagcactttgggtggccgaggcaggcagatcagaaggtcaggagatcgagaccatcctggccaacaaggtgaaacctcatctctacaaaaatacaaaaaattagccaggcatggtgatggaggcctgtagtcccagctactggggaggctgaggcaggggaatcatctgaacccaggaggcagagattgcagtgagctgcgatcgcaccactgcactccagcctggtgacagagggagactctgtctcaaaaaacaaacaaacaaacaaacaaacaaacaaacaaacaaactaccatgccttctcaacagtcctgcaaatatttaactcattccagcattaactcaaaagtccacagtccaaagtcttatctgagacaaggctagtcccttctgcctatgaccctgtaaaataagaaacaagtttgttacttccaagatacaatgggggtataggcattggatcaacattcccattctaaaaggaagaaattggccaaaagaaaggggctacaagcctacacaagtccaaaaccaagcagagcagtcattaaatcttaaagctccaaaataacttcctttgacctcctatcccacatcaagggcgtgctggtacaaggggtgggctcccaaagccttgggcagcaccacacttgtggctttccagggtttagcacctgtagatgctctcaagggctggccttgagtacttgtagctttttcaggctgagagtgcaagctgccagtggatctaccattatgatgtcaggaggacagtggttctcttctcatagctccactaggaagtcctccagtgggactctgtgtgggggctccaaccccacatttcccctccacactgccctggtagagattctccatgagggttccactcgtgcagcaggcttctgcgtggacatccagacttttccatgaatcttcctaaatctaggtgaaggtttccaagcttcaactcttgcactttgcactgcaatggtagtgcaggtccactgaaccatcaaagaccagttgcagaaggtagaagttataatcaagatcatcagaactggcatctggtgagatctctctccttgggttgtaagtgaccaccttctctatgtccttccatggactttcctctgtgcttttgtggta

SEQ ID NO: 303 - DNA, 886 bp, Homo sapiens; identical to SEQ ID NO: 4

SEQ ID NO: 304 - DNA, 657 bp, Homo sapiens; identical to SEQ ID NO: 183

SEQ ID NO: 305 - DNA, 292 bp, Homo sapiens; identical to SEQ ID NO: 69

SEQ ID NO: 306 - DNA, 2157 bp, Homo sapiens
ttggcagtaagatgcacttgcacaagcatcagaagctgaaggcgagagaaagcccttctctgaattggcctgggcagatgcgtggtagacggtggctttcaaacaagctcctgcacgctgtctgctttctgctctggtgctgcaggcaattgaaatgatctccatgccttctctgcaatcctggcacttcctgattctgtggggtctgacagtgacttccctgatcttccctaatgcagcccttccgtccattatgaatgcctctaaatcccttgtattaaaaccccgtgtatttggaatatctagagcagcttccagtattataaccaaaccctgaccgacacgctggcatagataaagaagctacgtaaaatgatgtgtggggaaacatcctgttcaatcttcccggcagtgctgaggttaggctgtcattttcccagtttcatagattagaagcctgaggctaaagaggtcaaggttgcctgactcccaagtcattctctttctactagatcattctactctgcttctcttgatagatagggagaagcaggcataagagggaaagagaaaagcagcaggggaggacatgacagagatggacaaaggaagaggcaaggagagactcatttgaagtagaaagggagagagagaaaccccaagggttctggaaagttggagaaacttctcatcacctctactcagacggtgctttacaaggttacccttgctcttgggcaatagcaattagccaagtaaccaccgttcacagccctttgcctgttctttattctcaggcttttgagactgcagtgtgaacagaagacacaacaacccacggagtgaagaattctctgggctgccccagcaatgcagagcagtgttcccctggagggtggatgaactcaggcagaggggcagccccagccctgggctcagggggaatgggaatcaggtttgcccttgcaccccagggtagctggtgaaggctgtcttggataatcttcggcctctcccttccagactcttctttaagcatccccatcccaccttggtatcctagtccctctgctactcccgtgcttgccttcctgggacagtgatagttgcagttcctgctgacttggagtgcccctccgctctgtgtcctgtgagaaagcggatgattccaatgtacagccaatgatgagcagctgctgggctgaagggactggggccattttataccagttgtaggatgttacacagaaatgcctgaaaagcaaggagcagctatcagaatgtttggtgacacagctcctcctgtcgtggttccttcggcatggacttcacattcagcagatccatgaggtgttccctttcggatgagctccaaggtcttaagagagcatctctagtctgcgtgagtccgtctgaacgacggtcctgagcaagaaccacctataaccatctgctcaaaataactcaggggaagtcaaagctttctatgtggaaggtgactgaaaccacatacacagaccactgcagcattcctgacattatggaacttggaaatgattccaaacatggccatagcttgagtaacatgttttgctatgacaagaacttggactgtagtccttccccctctcaagaatgtgacatcacaccttatcagatcctacgagtgagctactgacctcaaccactgaacttcaaactatgtaaaaacctaagggttcgacagacactttgagagcttgggctgtggcaagctacactctgtcagcctctcttcgacagggccccaccctgctagcctttgaacttggaagcatcgcccacaaacaccagtgccaccctctagccttgagggaccatatatgtctctgtgaatctccgttgcattggacagcttctctcccaagagctgctcttataaaagagacacaccacattttaatgaggcttcgctctccacagaggcctgcttccatcctaattgagcaagtagactttagtaactttggaactcactcaccccgtgactaatacaccctgtctacccagcgcattccctgtgagatttgttcatgttgttctccccctccttaagcattgtgaacctaggaaaaatatcatctctgtagggcaataaaccatgtgatttgtgaaatc

SEQ ID NO: 307 - DNA, 451 bp, Homo sapiens
gtgcgcgcgcagcgtgggaggaggccaactctcggggcgctccctagccctgggtgggtggagcgggggaagcggagtacgttggacccggctccgccctaccccacggggccgcctggagaggtgctgggagctgggtggagcttagaggaattaaactttggccctgcgcctcgtccagcctaggttccacccttttctgggaacatcttcacttcaggtcagctccaaggaggctatccttgcccatcttcctaaaatagagctctcaaaacctggctgttttccttcagagcactggcctccaattgctccggtagattgcaaatgacctgctttctttctgttcccgggcggcatcggacccgtcggagagtaaatcccaagtaaggtacctgccgttggcagatttgagctttcttcttggacacctaatacccacagtcctcca

SEQ ID NO: 308 - DNA, 1382 bp, Homo sapiens
tttcctgtgttacccaggctggagtgcagtagtgtgatcatatcttactgcaatcttgagcctcatgggctcaagcaaccctcccacctcagtttcccatgtagctggaaccacaggtcaaggaagcttttcctgatccactaactaaggacaatcaaacccttcatgatctagaatctggagactgtgtcttctgggaatagtatcagagaaagactgcccttactgcccacatgtagcaaaactttgagacgttgaattatgggtccataatctcacaactcagaggggcacctctagactcttggaactgtatatctattggagactttaaggtaaagctgaacagagagacgtttttctccagaagcagacagcaccatagtcatggacagctttcccaagatcacagatcaagacttctctgccgtcatgagactcataacctcttaattttttcttgcttatgcttctgtgaacaatagaattggaaaaggggtggtcccgcgtgcacccatagggtatacttttatttgtggaggattttgctgccaaccttatacatgggcaaacttatgccttcatggatggaagataaagggctaatatgggttagaaattttaatggtacctttgtttctccataatcattcagaaacagaacactggtccactcttgttaacctacatcataggttgaagagaacattgccaggaggccttcatccttccagatgggcaccatttgttgggtctttttccgtggtatgaagaaaatgaagcaatgattagaaattggtccctcggccgggcacaatggctcatgcctgtaatcccatcactttggcaggccgaggcgggtggatcacctgaggtcaggagtttgagaccagcctgaccaatgtggtgaaacgccatctctactaaaaatacaaaaattagctgggtgtgatggtgcacacctgtaatccagctactcgggaggctgagacaggagaattgcttgaacctgggaggcagaggttgcagtgagccaagatcaccccactgcattccaggttgggcaacagagcaagactctgtctcaaaaaaaaaagaagaaagaaagaaattgatccctcataataggctgtatagcagattctactgcaaaggctatggttgcacaacagacttctttgaatttgcttgctaaacttttactggataatactgggattacaggtgtgagccactgtgcccagcctctcctgtttaactgtattcattctaatgtttacttacttctttaatttgtaaaattgggtcacttagagtttttttagcctatcttgccatttagccactgttactgataatttggatggaaaagaaaaataaat

SEQ ID NO: 309 - DNA, 916 bp, Homo sapiens
caggggaccgcaaggggacagtgaggggccgggcctggcaccgacgcaagctcggggagcgcgggtggtgggaggcggcgcgtgttgaacaggaagtgcgcggcgtgcagcgccaccgtcccgctccccgtcgccccacgccgccctcgtcgccgcgcccagacccctgcggcggccgcagccgcttgggactcgctgcgagctggtttcggatccatcccgcctcccggcgtctcactgtgtgccctaccctttgaaacacgcccccgcgcccgccctgccgtagaccaggcagcgaggaagcccacagtctccgggggcgctgcgcgcgaagtagcacgtgcttctcgaaacaccgcagcccccgggtcccgccccgcccggcgcgcgcactcgaacccgcccagagagcggtgcgtggcgctgggtgcgagcagggtctagccacccccaccctcaccccaccccaccccaccctgcttttttcaggttcatcaaggtttgcgcagtggatccgcgcttacagttttaatccttgtcaaaatgatcatttgccagggtgcataaaacaccctatttgatgagaactggttttaaaggaaaatggggccatcagaaggaagccggttggtgtgaagagacgtctgggaagagcccctggcgagggccctcattccactgggtgacccagaaggagaaaaccgcgatggcgcttctcatttgaaatgttttctttatggacagtgtttagcaattgttataatgtgtacttttgttgattgatctgtatacatatgtaaaataatttgttctctgagttaattttgttggaacaaagactttagtgcttcctacattaaaacattttactgtattgcctgcattttaagagcctttttttaatttttaatttttt

SEQ ID NO: 310 - DNA, 478 bp, Homo sapiens
cgctcgtccccgcaggagcccggggctccgccgcacccagcgctagggcccaggccgggccgcggcatctagaacactgagaaatccaggatggacacttaacactaccaaagattgatctattttggagttagttctttagatcagaggtccccaaccccaggactgcggactgccactggtctttggcctgtcaggcacccggccacacagctggagtgtgaaaaaaaaggaaaaaactgaaaatctcaagaggattccaggaaatcaaaacaatgaattattgaatcaagaatttgaaagagaaaatagatgcatactgaaaaaagaattttgtttagtgagatagatgtaataatgaaggcatgttgataacgggggagctatgtatatatgaggggagggatatattggaaatctctgtatcttcctctcaatcttgctgtgatcctaaaactgctctaaaaaatattttgag

SEQ ID NO: 311 - DNA, 725 bp, Homo sapiens
cagctgcgcagcagcatgagcgtgactacagatcaggccgcaccgtttaaaatggatacatgggtcttctggctaacttcctgtctttggtagggtgatcatatgctttatcatccaaatccagacacttaagagagtgaaaggggcactataataattgcacgaggacagcagacataactttagctgtaccttgcaaaccagaacatatggtcaccctaccctccggtcactttttcttctttgtttccattcttttaatttttttcccttttaaacacacagcattatctttccctgagcaccattgtctttgcaaatgctcttgcaatcgggatatttttgacctggcaacatgcatattcagtctgaacagtctctctgaacctaccccaaaacctggttttagcttccaggcagaagactctgttccctggcttgcaacccccatgactcaagaatgaaagatgtcagaagatgtcacaggacactgttcaaggtgccatcttggaagcaggagcagcccttgcgagactacaagcctgctggccccttgatcttggacttctcagacaccaaaactgtgagaaacacattttttttctttacccgttacccagtctcagatattttgttataacaccacaaatggactaagacagtatcttacatacagtgaggtgcatatacctaaagttacaactttgtactatcgttttttggtt

SEQ ID NO: 312 - DNA, 474 bp, Homo sapiens
acagcacctgccgagttgcccccactctctactatctcgacagcacctgccgagtgctccccactttctactatccagacagcacctgccgagtgccccccactttctactatccagacagcacctgccgagtgtcccccactttctgctatcccgacagcacctcctgggaaattcaccctcagctgtggtctgtgtcccagcccgggccctgggtttggtgtggggctctaggtgaggctgggaagcaggagtgtcccaggcagaggggccagacatgggggagagaaagagcggacacccggtgggcagcacagatcccaaacccactccactcccctggaggctctggcctgtgcacccatcttcgtctcatcttcaccctgcaaggatgggaggctgagactccctggggcaacccgggagagagggttccaggaccaaggggagctctggagaggacagaaaagccgc

SEQ ID NO: 313 - DNA, 500 bp, Homo sapiens
tcatcaggaaggaaatgaggcagcccaaggaggcgggagacggggccctacccagcacccagccatctgcattgacacggctgcccgcaggatatcactgcccccatcccggggcccaccattaccagcagggagagggaggcaggaaagaaagcacgcagccaaagagcgcaaagaggctcagaggaggcccgggtgccctggagagacgctgcgtcctgacgacacagcatccctgtcccgcagcggagatttcccagatgaaggattccccggcgggagacagggccctgcacacaggtcctctgccacgctgctcaccatgcctgtgtgttatctccccatgaaaagtcacctaggccgagcatggtggctcacgcctgtaatcccagcactttgggaggtggaggcgtgcggatcatctgagatcaggagtttgagaccatcctgagtaacatggtgaaaccccgtctctaggaagaatacaaaaattaactggg

SEQ ID NO: 314 - DNA, 3624 bp, Homo sapiens
agtgttatttaattttgttcactgtgtttacagtgcagttttagtcacctgaaattctaagagaaaagatcaatatggttttgccaatcaaaggtcattaatacttggaatgaaagataacttatcctggtgatgaacacatgccttttgaaaagcatcagtatctccttaaaatgtataaactactgtaatcaatgaggaagactttttcttatcagatttattaaactcatttaccatacaaatagcattataacattaaagaaaattttttaaaaattctgtaccataaaacaattactggttccttcctacctgtttttaggtttgcagatgaataatgtgtggatttttggcagacacactgctgaaaatttttcactttgttgggtgagcatctcaccctatctccatttgtctccctgctcgtgagttctagagaagaccaccagtaagcaagtgaaattctttggccaagtcactgatatcagaattccccagaggcaccaagaactttgatttccagaaattgtttaggcacagccactcattcaaccttatattttgtatctcagagttaaggttgcatttgggctacctagcctgtagactctattttaagacaagcaggcatttaatagttgttggttggttgattagagcttctagccaatttttaaaaattatttgaatagataaggcattcactggttcaaaaaaaattttttaatcatcacttccacccatccagttatcactactgaagtaacctctactttttgtttcttgcatattctttctttcttttttttttttttttttttttttgagacatagtctcgatctgtcgcccaggctggggtgcagtggcgtgatattgggtcactgcaacctccgtctcccgagttcaagcaattctcctgcctcagcctcccatgtagctgggactacaggcgcgtgctaccacgcccggctaatttttatatttttagtagagacggggtttcaccatgttggccaggctggtcttgaactcctgacctcaggtgatcgcttgcctcggcctcccaaagtggagttacaggcatgaatcacagtgcccagcctcttgtatatttttccacatacacattttttcatacatacatatgtgagaataaatgttcttattccccctcccccatttttatgtaggagaaaataccgtacaaacccttctgcacattggacttgagatggcttttccatctcagtgcaaaaaggcgacattttttcttaaccactgcacattatttggttatcacccagtttagggacattgagtttcttttgtactctagtgcttgaatgattatccttggatgtacatctttccttgtatatttaaatatgtctcatctcagtttccacaggtggaattgctctgcaaaaaggcatatatgtatttttaatttgccctctatgtactaaatgttttcaccccagcattgctgatggattagagtgctgccaagtttttggatttttacctaccagcttttgaagggcagattatttcaagtcttaattaatattttcaggaacagtaacaatatcatttggttaaattgagagaaatggggttcagttgacagaatttgttcaggatatagaatttttctgctgctgctcctgcagctacacacctacaactagtaaaaacatggttgcttaggttgtcaaatgaccagcaaacctggagaggaacctggaatgactataaacagctccacccacactttttttgggcaaatgtgcaagcttagtagaatctaaaaggatacttcagcctttgtttgagttgcagaaaattaacatggtaaggaggaaaaaatcactaatttttttaaaaagttccctgatacaggaactgaaaatgatttttgaccaacctgggcaatagagcaaaatcccatctctacaaaaaaatacaaaaattagtcgggcatggtggtgctgcctgtagtgacggctactcatcctgaggtgggaagattgcttgaggccaggaggttgaggctgcagtgagccaggatcacaccactgcaccagcctgggctacagagtaagactcaagaaaaaaaaaagatgtttaattaatcttgcttcagtgctgaggtggtacagggagggagaaagggatattgggctatgaattccatctaaactggggatttttatcagggtgtgaagaaagattttcaggaataattatctgagttacttggagtaaaagtagcaggaggaggaaaagagatatggcctgtgggtctctgacttgccaaacttcttattcattttacaaatcatgatttctagagcatcttaatctttgaggcccagctgcttggaagttgcataatctctatacttcagttcccccctataaaatggggaatatgatagaatctaccttgtatttgagaggactaaataaatataaagtgcttagaaaagtaaggactcaactactagtaataattattttgacatgtttaagtaatcagtactatctggaaaactgtgctaatagtgcctgatctacacaaatttaagtgactataccccttttttgagtcagagtctcactacgttacccaggctggagtacagtggtacgatctctgctcagtgcagcctccgcctcctgggttcaagagattctccagctactcaggaggctgaggcaggagaattgcttgaacccgggaggcggagtttgcagtgagccaagatagtgccatcgcactccagcctggacaacagagcgagactccatctaaaaaaaaaaaaaaaaaaaaaaaaaactcagtttttggttttgaaaatgtcatgatacctgttgagataactgctgaatagatgggtaatacacagtctagggcatggtatcaaaagaacttgtcactgtacatatcggaaatggtaaaaatatgttttgccgttttcacgaattcattcatttttcatgtttcatgaattcattctttttaaaaaaaaaaaatcctgctaattctctgtttctcttgcttttctcctttatgactaagttttcctcattatgggttaccccacattactgcttacgaagacatctctttagtcagaaaacagtagcttggttcagttctagcttcattgttaagctcataggtaaatctggcaaatggctagaaacagtcacatgtttgcttgtccttaatgctctcaccttttcccagctatttggatgtatatacttttgcttactttgtagtgtaccaacttaatatatgttatagactaaatgtttatgtcctcccaaacttcatattttggaagccagacatggtaactcacacctgtaaacctaacactttgggaggcctaggtgggaggattgcttgagtccgggagttcagaaccagcctggacaacatagtgagaccccgtctctacaaaaaaaaaaaaaatttttaattagccaggtgtggtggcatacacctgtagtcccagctactcaggaggcttgcctgagcccagaagtttgagactgcagtgagccatgatattgccagcctgggtgacagagcaagaccttgtctc

SEQ ID NO: 315 - DNA, 847 bp, Homo sapiens
atcagatgtggcttacctggttcctgagtcaattccatccaggtaggaggaatcctatcagaaagtatgtgagtgcgtttgcagagtgcattcctgtggagcccccttatctctggctgcatctgcttctgcagggagaaagtatccctgctgtgagaggtctgggatctggagtacagaggatggtgaagccaaggcctgaagacctttcctgcaaggtcgcagaggaagaggcagaagaaggaccagaacccagctcccctgactccctatccagtgctcttctcatagattacattgcttcagcatccacctggctattgctccatccaggggttacaggagtcactgactgttttggttgcttcttggttggaggatgttgtgcctcaccgatgagagccggaagcaaaggtaccagttcttagaggaagcataggaatgtgtcccttcctgctcgggtctctcaactgaactcaacccttccttgattgattgacaagcatgttatctctcataatccctgcccggtaagggctgatgtccccattttacagatgaggatattggagctcagagaagtgaaatgattgctgaaggtcacacagcctggcttcaagcctctcgggctccaaaaggcatcttctgttctctccgtcaggaagcctcttttggatgattaactgagattaaaaatgaaaagacacatgaaagaaaggtcctttttttcaacctgacaagaactaagaatgcctctgtattccaggcacccagaccagggtgggctggaaagccagccagagagaaagcaggagaaagaaagcatgttctaacaggaaggttaaag

SEQ ID NO: 316 - DNA, 276 bp, Homo sapiens; identical to SEQ ID NO: 171

SEQ ID NO: 317 - DNA, 2057 bp, Homo sapiens
gcacggggtaggggtggggggcggagggcgagtcttggtcttgagctgctggggcgcggattctctttcaaagccagaaccaggcctgtcccggacccgcgtcccggggaggctgcagcgcagagcagcggggctggggccggtggggggccgtttgggacgcgcggagaggtcctgagcgcggtggctctgcgtctcctagctctgatctccaggctacccctgtgattccgcgcagaggtacctctcggaggacgccggggtcccatgggcggcgccgcgcagggcgctaggaccccgcggggagcggaggcggcctcggcccgggagcctggaggacctggccggtcgatccgcccgggctggaaaactttctttataattacttctccaggtcggagcgcgcggcttgctaggcgcgcggggccggcgctgttacccggcgtggagtcgccgattttttttcctgcgggaccgcggggccccccagactagcggagctggacgccggggcgagcacggggaggggcgcaccgagggaggagacaaacttaactctggggccgggattccgaggcgggggccgcagccctcgaggcccgaagccaccgcttcctcccccgcctccccattcaggaacaaagaaacgccactgtacatgcacggttcccggcctgtggagttgtgggaggaaggcgatgtctggccttttttgcacagctgctgttgcctgcccagagatcgggaactctgccccgtaggactggaagaaacctcagtaatgggaataagactttgtccaatagggggctgatgaatgtgtgggggcgacaatggcaaggagtgggactcccggcccggggttcgccaaccccaggggccacaggtcctcctacaattgaaccagaattcacccacccgggcctgccctgtgcagggtgccgagagcccagggatgcatgagagggtggctcctgcctctgggaactgggacagtgggagagacggataagttgtcacacagaggctgctgggaggaaggaggagacagaaggagtaggggatgggacttcattcattcatcaaatgcacacgaggcacaaatgggaatcaagggtggatgtgctgtgatgaagagaagtcctgccctgaacaaggtggcgctgtggaggaggcagagatcagatttgtctgcggaggtgttatggactgaactgtgtccctgccccaaattcctatgttgaaggcctaacccccatgtgactgtatttggagataaggcttttaggaagtcattaaagtgagatgatgtcatatgggtagggtcctaatttgataggattggtggccttatcagaagaacaatgtcatgggcatgcacagaaaggaggtggccgtctgcaagcagggaagaggcccctcaccagaacctgagggtgctggcagcttggctttggccttgggcatccagcctccagaaccatgagaaataaatgtttatggtaggtctatgatggcagcctgcttggactgaaccggcggtgagacagggcttcatgcaggagcagacctttgagctgggccttgaaagttgagcaggaatttgctggaaggataagggaggaaggctcttctaggaggagggaatggtaagtgcaaaggtggagagcctgccagtgcatgtgttctggtaacaaagaacgagatggttggccggctggagagtggggtgagggagggtggggcctagataaggctggatccgcagacagggctgggctgatggccaaggccactgcaggtgaagggggaacccttatctcccaggcttttgacctccagattttagcaggggagcttcgttgtcggatttgggttcctgagaatctactctggccaagacggagagggggtgttgaccagatgggaaaggatggagacttgtattgccccagtaatgagcgggcagggtagattagaacaagatgtcaggacttgggggctgaatgccaggcttctggctgggattaccaccccctgacacatataatgcccag

SEQ ID NO: 318 - DNA, 674 bp, Homo sapiens
agcttcaacagcactcacttcccctgtcttgatgaggttgaatctcctgtttcctggaccccaagtcttctgttttcttgatttacttgctgggctgaggcacacccttaagtaattccctaacaacagggttgctcctagatgtgtggggcctcagataaatatttttttgtgggacctttttctaaataaataatttgactaagaaagtattacaaaattcatggacccacgtggggtatagtgttttattgaaagtcattcagaataatggatacagatgaggtacttacatattcattacttaatcagtgcatgtgaaaattctttcttcataatgtccaggcactatctctgtgttcttggctaattccatatctccagtcatgaagaaaagtagcaatactgtcattactcacaatgccaagttcttgggaacttgtttacaatgaacaatatagatctgtactacttttgcaatacaatttattgaagtctggttatattgttatagatgatgctgcaccatgaatactggctttcaatgactttctcaaaagttgttgctgtgcttcattgttgatgaccaaaaatgcaagtcttatccagagtatgcaagaaaatgtgaacaataatttgttttctgattatgttgaatttactgtttataatct

SEQ ID NO: 319 - DNA, 207 bp, Homo sapiens
tgtccctctcaggggagaaacttttgggccacagcttttttctcagctatagcaaggaaagcagatagggaaaagagtatcttttcagtgtgtgtatatgtggaggtgatgtggcgatggtgttgaagagagaaagaaagaagctcatctcccaataaattttgttctgtattctgattttttaaaacttcatatatgccgggcatg

SEQ ID NO: 320 - DNA, 1347 bp, Homo sapiens
gaaggaactgggtgggccaaatttaaataaacacatagcactatcttttctcactgttaaatatggctctctgacaacagtgatgctaccctgagttacctctcttctgtattttcccagatctcacttggttgaccttaggcaagtcatatcacctctctgtgcctcaattaatccatttgcaaaatggggatctcaatatctacctcacaggaatgttgtgaggcttctcataaattgattttggcaaaaatgaaagatctttaagtgaacaaccaagtattataaccattgttataatgatagttatagtaccttatatttaccctatgtaaaagagaagattaggcttcctaggtgataaacagataaatttgagtaagaaggataattaaagagtggccactggaagcaatattatttattctcttactttcactttccctatatcttctttgttactaacaatacgattatcatctgtttccatacttgaaatgtattaggacctaaaggaagaggtaggcaaaattcattgcttcagaagctgtattcttccccctttgtaactctgcttggaccacattccatgtcacattctcagaagcacaaaggcaattttccagagccctttaagctttggccagttcagtttcaccacttatattttctctttcccaacttactttactctgaatagtataggtaggaggagggaagttgggtagggtggttgggggtgggagtgggttggaagaggatgggatttataccagtggcaggatatttctctgttttccaaacactggttttaatttccatttccttttctggtgttggggtggggtcaggggaagagatactattttgttaactgttaaaagctctccttcctttcctagagtcgctacaagtagctgtgttggacattactttataactatgctgtatgccatgctgttttcattgtatcacagaattaaaaggggaagagagttcctagtggtgtccatccctgttttttgacaggcagtcacacagtgtctgttgaagtctatagtggatgctatcatgtgccgcccagatacccctctccaggacagaagcactcattgtcaagctactgagagtgttggcaacagatacatctcagctgaatttctccccaagatagggctgaccaaaatgtacatacctttctcagggtcagcctgcatccaatagctgtttgatgtgagtatataaaggccctgacctccatcccaattcaggatggctttgaagggccattctagctccagaacccccataggattgtctgaggtctttgctgtgactgaattgcag

SEQ ID NO: 321 - DNA, 1209 bp, Homo sapiens
agagattccatcatgtcatcaagacccatgataaatctttaaacattttgatttttttgaactttacactgtcactctcaacatatgggtctcatactttggctggttcctctgcagtgcctcaaactctgtcccctgagcagaaagccggggctgtatttacccaagtggctctgccctgcacttttcataattgtctcacatttaggacaaagctgcaggtagaaacagggagaaaagagcagttgtatatgtcccttggtttcacagctcctcaaagaaacagagaattaattacatggtagatctacactatactgaatgccaagagggagccatcaccagccctctattattgctgctcctacgtcttgaaccaaagcagcatcctgttctcagacactaacttgggtttggagacctgagtgtttggagacacgatgtctaaataataaagcttggagaatgtgggcatcgatcccactacctcttgcatgctaagcaagcgctctaccacttgagctaattccccacatcaggggagcattatttattgttagcgggtggcctggaacacaggtgatttcggggccttcagcaggaaagcagggctctaagagcagatcttctcattgatgggccagggcaaacagcagtggctactcattctctgcaaagaaggaggagaaaagggaacaaggagaaagtcacaacgggaaaacttcacgctgccaaaatgtcaagtttagagtattccgggacagaaaagggcacgtcccagcaaaggaggacctgcctagacctgcccagataactctatttgaaagccttgacactgcggttgagagatctctggagtgtgtgcaaccagtggtcagtgaggactggaaagtggaccattgttcagttcagtcctcaggctctttttaggtaagttgtttgggattagagccacttattcacagctggcaggtgcatccacaagctcatgaacaactttatgggtttgctttctacagtatctgtccaggcacattctagttacttgacacatcctggtttcagtcctctcaccagaaagccagggctgtatttacccaggtggctctgccctgcacttttcacagttgcctcacattcaagctacaggcagaaacagggagaaaagagcaattgtttatgtcccttggtttcacagctcctcaaaga

SEQ ID NO: 322 - DNA, 240 bp, Homo sapiens
gtttgagcaaagctgtaggtgatttgacaaaatcatctgcaaaaccagatttctaacacctccctgctgtgtatctcatttctgctgatgtgtggtgcttcataagatggggacgttaagcatgcagcaactacagtcatttgttctcagaggagggcatttccactctgaatttccagttccaaacatttcagttttccaccaagacatcattcctgggtttgggattcctgaattttc

SEQ ID NO: 323 - DNA, 752 bp, Homo sapiens
cgctgccagcagcttccgcctgctacggtcctggcaagcacctcgggatcccattccttcacagggaccctagccagctgaggcctccgaaaccttccctagctggatttggggacagaggagcgctgttaaagctgatacattcctgtgggtcaactatgcaactaactcagattttgagcaaacaaagctctcaagttggtgatcctcaggagtctctgcattagttggacagctcttctggaattatcttctaagtcaactgtgggttgggtaggtggctctgctgatttttcgctggacttccacatttgggacgagttggctgtcatcagctctagaaagggtgtggccgttttacattggctgttttcctcacattcctcaagcaggtactgtaataaagaactggagaaatacagtcagatgggaagtagcccttgctgtcaaggagcttgccatctaatgggggagacaggcaagtaaaccaaagactacacagtgcagtatggtaagtgccatgattttgatgtgacagggcacagtggacgaccttccaaatcaaagcaagtaactaggggttgacaatggtaagtatcatagttgaagtatccttgaacaaggtttcaggaagaagaagaagggaatttcatgcagggaaacagccaaagctcagtgagtcaaaatatcacagcattcttggtaagcccaattgttttttctgttttgctattttggtggagagaaaggaa

SEQ ID NO: 324 - DNA, 4445 bp, Homo sapiens
taatggattaattttcaaaatatataagaaattcctacaatttaatagcaaaacatgcataatctgatttaaaaatgggcaaaggatttgaacagacatttcttcaaagaagatatgcagatggccaacaggtacattaaaaaatatgctcaacatctttaattatcaggggcatgcagattagtagaactttcaagtaaataaataaataactctacttcacagactaacctataaaatgctgaattttgttatgtaaaatgttacagaaataatttcctcacaattgtgttaattcgtttgtgctactattacaaaatatttactacctggtcatttataaagagcagaaattgatttttcacagttctgcaggctggaaatccaagatgaagtcacctgtagttcagtgtctgcgtctaagagagcactttgttgctgcacccgccagagggaagaaatactgtatcttctcatgaaggaaggaaccgaaggtttacaagtattgtggctgaaggctgtgtctattcctgcttcctccacctcaccttgcaaaagtgtttatccaaataaatccctcacacatctaatcccattttggcaaattcagtttcagaactttgccttcactactagtctcaaggaaaatatattaatacacacacacacacacacatgcatgcacacacacacacatatgtatatatttcccaatctattataggtaaaatatactcttatcacgaataaatccaaattgtgaatgcttaaaatatactttacagaatattaaaatttaaaagcatcacaggaaaaatattaatactgttttcagaatttcagtatgtgaataatatttacattacagtttcatatgaaccttttacttctctatttagtatgccttcatgtcactgcagaggtatgaaaaggagagctctcctagttgtgaaaaaagaaacatgttttattgggagctaagtggaaggttgaacatgtgggaatatctgggcatgcactgaagacaccttttgcatctcccccatccacatagcaaagtgaatgtggtttgtgtccatttatgcaggatactctggaaaaccaaactgaagcaaggttaacatacatttttaaaagaaaactaaaggaaaacaacacatactttattacctatcaaagtaaccacttcattatattttagtggaagctattatttattatcgaattatttgcttgggcaggaggatacagggtttttccatttgggttgtatatgttcctcatgagaaaagctgaagacaaaatcttacccttctgcccaaagtcaattgaatcaacatgtttaccttgctccacggagctgctaacctactggctgggtgttgtgtggcttggcaatggagttctgcatgacaggaacaatggtttttaagtggactaatcagagctattaatgcatatgcagtgaaggcaggaactttgctacatgcagggcttatcattttgctaataacaatgcctggcacagattagcgatgtgttgaaataaaacatattctgggagatataagatagagaaagagagcagcatgtagtagaaatagatgtcgaaagatgaattaagatgatgcattaagcttgaaacgtgaggcagagaaagctgtacataagttgaaggctttgagttaaaagactataggaattagatgagtgggggctatggagaacagagagaatttagagtgtggacaagtgttctatgagcagagactgggactagccaaaacgtgatgatgggcagctagcttggaaagaatgcttacaacgtgaaaattatatatttataaaaggccattacttctgttaaagaacaatagaccccagtgaaaagaaaggaaattgaaaaatagagaaaatgtggagaaaactagaatctctatagacagcgtcaatgcagcatcaattatatgaaccacttttgagcacaaagaactattgttttgaccttggaggcaatttggtcttcattaggtttagctgtaggatagttgatgttcattattccctataacacttgtgatggcaaaaccttcacaaatttatatgatctaggtatgttttcaatccttacaacccaaataaccgatcataactctcactatgtcatttgaaaaaaaaaatgatcatcagaagtgtaattcaattagcaagtatcagtagtggagtataaattattattggttaatactaagtatgattgaaaaatcgtagtagatggaaatatgggaatctttattttggatgaataaactttatgcctaaaacatatgtttataaaaaatactttgtgaataaacccattgtctaatatttaaaagagttgaagtatgctattataagatcttccttaattgatgaaatgatgcaaagccaataatattgctccacttactgaagtatagagatgaagagaaaactttttctttattccatgttctatataagtcaagaactagagctcaagattaagatttttgttttttgttttttttccatttccctgggaacagagcaacagtctttctgggtctaaaacatccttttttcagtacaccccacagcatcctatagaaatatgttgcaatcagttgccaagtcacatcctagcttaatgtcagcaattttctttctgaaccaattttgcactcagcattaagaggaaatattgaagggagacataccttttatgtttgtaaaatttatacttcttgagataaaaaagcaactatatccattgtcgtgggatcttgagaagaaataagaaaatgaaatattatagaaaatattatattatttaattgtcctgttctaaaacactttctaagcctgcctgtttttttgccaaattaaattaatatttggatgtagacagcttttcagagtggcagtatcatagtcaatgaagatgacctgaggcacagttattgctaattggacatagaaaccaccttcactcatatataaaaattattatgtgctacactagatatttcaggagaattgataaaagaaagactgttgtattcatatgcttgtcttcctggctagaggatctgttttaattaatcagctcatggagtttggaaaatatttatagtatacatagctgagtgttcatgtaaattttgaatacattcatacatcttttttttaaaaaaagattgaacttcaaaaccattttcttacatactcagtagaagttgttatgagccaacattttttgtgagctatactattttaaacatctaaagtaaattatttgacatataaaaagacttcttcatttaaaaatatatcttttaaaaataattttacaagtgatggcatctcattttagaagaagaggcatcaatgacagcagttacagtaactcgatgctgaatatgtttttaaatacaagatgctgtgttcagcattgtacatacattatcaaattttattctgataatatgctgcatgatgtattaggctgggttctctcagacagaacctacacgtatacttatatatatatacacatgcatatacatacacatacagagagagagaaagagagagagagagagatctctacatttattagaggaattggatcatgcgattatgggggctgagaagttccaggataggttgtctgcaagctggagaaccagggaagagagtagagtagctttctccaagtcctgaagcttcagaactagggaaactgatggtataactctcagtcagaggccaatggactgagaactcagacagccactttgcaactcctggaatcccaaggccagagagcctggagtttggatgtccaaaagcaccagaaggagggtgtcttaggtccaggagagagtgagctttcctatgcatttttgttttatccatacccctgaccaattggatggtgcccacccgcattgagggtgggtgtccctctattaaatattttaactataattttaactgtgatataggcactgaattcttgttgctaataatctggtaagatccatctgaactatgaagtgagtacctggaggaactcctacattttaggctttcaaaggttacaggcttttcgtgtgtgtgtgtgtgtgtgtgtgtgtgtgtgtgcgttttgagaaaaatggaattcaaacactgtgattagaatgtatgtttacttatatagaattaatgaatgtatataataataattactgtatataattttaaaatataataaagtctctttatccatgtggtgttagtctgtctcttccattttgtttttcttcccttcttgagcactccttgcttttttacccatggccactgtttgataatgaacatatttgtagcttctcattttaagtccctttcgacactttcagagactttatcctgca

SEQ ID NO: 325 - DNA, 2469 bp, Homo sapiens
ggagaatgcgcgggtcgagtgctgtagttcgatttttgcgtgtgtgcgttgcttgcggcctttgtgcctttttattctttgcttacctttatgatataaagaccttatttcttacaaggaggaaaagaccgctgacttcagaaacagcgggaaccccagctcgtccccggtaattcaagaggaaacgcttgagcaattactgatgttgtaaactgggatcagaagacatacatggtatcgtatcccaggcaaggcacagtggctcacacctgtaatcccagcactttgggaggctgaagaaggcagatcacttgaggtcaggagttcgagaccagcctggcttacatggtgaaacccatctctactgaacatacaaaaattagctggacatgatgaagtggacaacatcacttctttccacatttcattgaccagagcaagtcatgtgaccaagcctgattcaaaataggctggagcaaggaggagcagcaaacataacattcccagtttacagctgaggaaattaagcttcaagttgcccaagtttatagaatgagtcaatggcagaggttgaactcagatgacaaaattggggtctggacgtgtgcaaggacttttccaaagtcagctggaaaggagctgcttagctgagaggttctggctccagagtctcctgtgaagttgcagtcaagatgtctgctgggaccccagtcatttgaagccctgtctggggcaggagaatctaggtccaaaatggccgttgcaggagtccttatccacaccatgtgggacctcttcatagatgttcgagtgtcctcatggcatggccactggctttccccaaagtaagcagtccaaaagaggacaatcaacaaaactgaaaaagcccagccttgtagcatttgccagttattgtgtaaatgtccccactatggtggatttcaggttaccactatgatatcacagaatgcagaattggaaggagattcacagcagcaccccattatactatattttcaccatacagatgcagtcgatgtaaattacctgaggagcataaataataataaaatgaagttaaataattcggaaatgattttgaaaattgtgttggtttttaatgtaagtttatatgtcagctttaataaaatctgtctttaacaactagcttgaagaattcttgaaaaattaataatcagctctcataggctagtgacaactggcttcagtgcacccctgactagaaacacctttgctttccaccacatgtggaattcccagtatttcaacaatcagaattgagcttatgagccaaccaagaaaaataacatcttatataagagacagcaatttgagagaggaatatcagtcagaagaaacaaggggaaagtcgaacttgtaaaagagagatgaaaatttgaatttttttaaaggcatccttaagcatatttaagtacaacacaaaaagttaaagaatttagtagataaatagaaagatgagatgattaccactgagacacagatcaatgatctggaagataaaaacaaatcataaaaataaaagtatcttgaaattttgcaaagtacatcataaatcaatgcatcagagattatgtgtcatgacaaaaaaatttatactcagaatgatatgtcactgcttactatgcaaatattttctatttctcctagcttcaaactatgcatatgggccaggcgcggtagctcatgcctgtaatcccaacactttggaaggtcaaggtgggcagatcatttgaggccaggagtttgagaccagcctggccaacatggtgaaactccgtctctactaaaaaatacaaaataattagctgggtgtcgtggagcatacctgtaatcccagctgctccggaggctgaggcacgagaatcgtctgaacccaggtgattctgcactctacttgggctctgtctcaaaacaacaacaacagcaacaacaaaaactgtggtatttttaatgaactaaatattaatctgctaacacagcataggttttatgattactgcaattcaaaagtcataataaattttaaaacaaatcctcctgtacctgttgtggtgcatgcagaaacttttcctgttcaacacacttatatggcactatatagggatataccaaatagctcaggtacatagtgaatacaactttaacacttatattgaaatgctaatcttacttgccaatattagtggcacattagcataatttaacttttataaaattatggaaaacagtttaaaattattctccctaatattagcaaattgcattaatggcatgtaccgtgtgccagtttgtttccaaataaacaaaatgtaccttgatatgccacttcagagccagcagagggagctcatacttttttattgttttcaacttactgaagaaaatttgcttttaaaagctactgtgttataaccaatgagaaccaag

SEQ ID NO: 326 - DNA, 2074 bp, Homo sapiens
atttttcctcctgctctttgatgccttttatttatggatatataggcattattagccacagaattgtggcccccatttcagatttttattgatacagaaaactctattttttgagaagagcaaattacatacaataacttatttgtactggtaaacacctttagactattagtattaataagaaacgaagtcctaaatttccaggctccctaaatcaagataaagaactgaaaataatgtcgactatgaaaatcattgtttggaaatcgtgatcttttttttttttttaacgtcttctggtgtcttcattataagaaaataaatgagatttcaagtcttccctgcctccagtatcatgtcctataactgaacattacacctttttaacgttttctttagaagccctgatttatttggctttggtttatgttgatacatgtccatgattattaaaatttctgattatttaggacataatttttaaggtatctttagggtgtacactctatagtacttaacatcttattcaggttatgactttgaactgcatcattataacactaaaaagcaaccttggctaacttcagtaccttacgtaacataagaaataaagaataacttgaacttaaaatactttttatatgtttacttcgggtattcttaagggctttcagtacaaagataaaaacatgcgttggaatgcatcaacattccaacttacataagtggtgtagatacctatggcattagtaccacattttgatggttggaccacccaccaaattcccttctctccttttttacttctttttctttctgtttgctttccttgcaagtttccttccgcatccttctttcccacctacaatttgtaactgaaagaaagaagtagctacagaccttacctaacctactcttaacctacttggtaggtagggttcagatgcaagggagtggctcgaataaagcattttagttatgccttttagaaattagggagcaagagatatatagaaaaattagaaatgtctcttctacctttattaagtctacctttgagaaatatgaagggcaggaagacggaaaaacgaacagaacttctgctggaatattgtgacaaatttactgacaaatattttctaatagatttttaccaacaggcagtttttgttttctttactgacagaccgtaaatgtacttctggttggcagcagctgcatcattataacacaaaagcaaccttggctaacttcagtaccttatgtaacataagaaataaagaataacttgaatttaaaatactttttatatgtttactaacattaaactattttcaatgcaggaaataaatatttccccaaagaggaatcccccctcaattactttctttcagacttaacaaattggagtagatgtggttttgctcattcttttatctgctggcaactattttaagtctcctgtgcaaggcagattccgatgacctcgggaaagtcacaggacctcagtttcttcaatggtaaaagcaaaggcagtggtttctaccgtcctttctcactgcaccattcagcgtcagtgccctcatgagaaacacacccaaagcccagtgtgctctaccccaaaacttgtgaaatttctagagtctcaaaaaagtgaatatgtttaaggcagtataataaaagccaggtggacgacagttcctaaagttaggctggtagtggcgtgaacaggggtcttttgggccaccctgagacccgccccacggggcttctcgatccacgtcttggcttctcgctccactttcacagaacgtactgaatcaggggcctgcatccccgtgccgtgccgagccgacggagaaatggactcctcttctcgctcctgtggagtttcgtcttctggtacggtggtttgctcttgagttacgaccagaaaccggaacagaaggaaagggagaagcaggggaggttcggggacgacggcgctccgggcagtaaggcagtagcttccaaagcgtggaggatgggactgaggaggagcagaatacggagaaagagggaagctgaggaaaaa

SEQ ID NO: 327 - DNA, 8217 bp, Homo sapiens
aggatgggttaggattgctgagatgggctggagccggggcagggggcctccagctaagagaggcctcctgagcttacctcatttggtctcagggctattctcattttccagatgagcagtgatgtgaacaatattggaaagcatcaaagaaatggatgtaaagtgtctggcacagagtgagtgctcagtgactgtgggtgccctctcgtccagctcctctctgctctgaacatgcctttctcacggcacttatgagaatgtgccatcgctgtttactccctgtttgtccccctctacatgctaaattctttaggcccagggactgtgttacactcatctccatagccccaggcctagcaaagtgcctcctgcctagtaggtcctcagtatttgctgaatgaatggatgatgatttcatggaagaatcactccctaaagtttccagcaacaggctgaggaaactcaggatgaaaacatcatgtctcttgcccagtcttcaccatgctttttagtggtggtcactgcactgcatgttttctttaagaagggtgagctcatgccaaggacgagggcatggggtctgtgccgggcacttcccagttccacgttctgggtgtagggaagagggaggatgcccacagagagggagggaaccaaatgcaggaaaggagggcaggaggggcagtgttggctcctggcgggcctggcatatggctgtgctccgagttacttctggtcctgtgtgtggggctgaagcttcagctgccaccagacatccctgccatgtccctcttgagagtcctaacctcactctcaagactcaccccgatgctctccatgaaaataaaacgcaccttccatgaagtgtccccagaaagctccacgggggaggaagtgccacttagaaatgagaaccaatcccaggtgaaagtcatgagctgaaaggcccatatcaggctgtcgtggatgaccttggatgcccctgaggtgtccttaaaggaggcagcattcgctttctcccagtgtgtgtgtggcagaccacatgcaagcttttgggctgacccagttgtgactatcactgtgtcctcgggtttcatcttggggaagggagttgtaccagttcttactcctggaggctgatttcctaaagtgcaaaattgggccagtctgttgaggcccaagtgttctggaaaagatctctgacagatacatggaaactgaatttagttgctggttaagagctttcatgggagcaaagctcttggctgtgggtttcttgattgtcaggtatacattagggcagtggtccctaaactttttgaccgtggagactggttttgtggaagacagtttttcatagattggtttcaggattaaactgttccacctcagatcatcaggcattagattctcataaggagcgtgcaacccggatccctcccatgcacagttcacaatagggttccagctccgatgagaatctaatgccaccgctgatctgacaggagttcaggtggtaatgtttgtccactgctcacctcctgctctgtggcctggttcctaacaggcaatggactggtaccggtcttcggcccaggggttggggacccctgcatcaggggacagaacaacattttgcagaagggaaaaactggtcttcctccttctccttttttctgtactcggccttctctcacttgtggacacttcgtggacatagaagaggggtgcaacactgcatctggttcctccaagtgtggtctaagacccgcaacctctgcatctcctgggagcttgtcagaaaggctgaggctcaggcctcagcccagacccacaggatcagaatctgtatcttgacaagactcccctggtgacctgaatgcacgttcaagtttgagaacattgatctaatcatggagataggtgttttgtgacccaacagccctcatttggattctagacccaaatccgtaacacactaactgtgtaactggggcaggttactctgaggctgttcgagtctccgaatcctcatttgtagaatggcacagaagtgcccactctattatagagttgttaatgggattaaattagtgaatgtaaagctcttggcacccagtgctgggaagggcagctatggagatgataatcattcccctttgccccccttcccaatcctggcacccaggaccaaggccagtgctctcagcaggagggaagcaagagcactggcttgacccattggtgctcaggacgggtagcactaaacagtccttccaatcaacttcacgtttcaagtgcctcaccgaggatgttgatagcaatgggtacagttgagtaacagtttactcgtattatttcattagatatttttattagtgccgttatttccatgcttttgaaggaattcatgagttttcaacttgtaaatgcaacacagtttaaaatagcagtctttaaaagttatggttgtaagttttaggccctctgaattaatgtcctgccctatgtgtctgggcatgaggccacagatgccacacagactgtacctagtgctgagtggagcctatgtggaagggctgcagggttcagctagaagtatccactggggcaaagctagtgttggaaagatcctggtctggcagcagaatgggcatcaacgttgtaagactgcatgtagcagggggtggctggatcacctggagcccagggacaagccttggcacatctatcccttctgattgattttacatattgaagtctgctctcatgggtctccttgccttgaagataattttctctcttttctgctaaggtcctgaacgtttctggcacattacttggacctgatggtaaacccattgctttgtcacaaggcactgggaggttatcagcactgagatgctttccaatgtgcagtctcaacccagtgccctcggcacacccacttcacttagacagtgggacctcaataaaaatgtgtctgaaaggacactgtgccatcattatcggtttaacggccagggccaatggggagaagggagcaatagttgagaagtgtaaatgtgagggatatctcacaaagcacgtaggaagccaagaaatgtaggtgaaatggacaggaaagatttcttttttccataagcctcttcatgtttatcttggaagtgaagaattctgagactactccatgaattgtcattgtggtagctactcagttattcttagataaaaccagcggtcccaaatctcagataactgtcaggaataatgttagaaaagtcaagatgaaatctttctgtgcttttgagcatcacacttggttttgatgcaggtggccaaaccacactgtcctgcaggatggccactctgtcagttggtgacttcttgctccagggagccctgggagctgataactcttggttggggaatgttcctctagctttttaccaattcagtctttcactgactggttattcttgcttttgtgggcggccatacaaatcatgtgctgtggggaagtcatgtcaatcatttcactgtctacaggattccctggaagcttgaagcaatttttcagataattaagtccacagaatacttttttttcctcaatgattgggatatctcaagtgagtcaaaactttattgcgattgcctcaattctccattttcctggtcatatatcaaaaaagactttctgcttcctatatgtggggcttagcatccacattgtaattcaccagagactctctggagagcttggcttggtcccatgtatcctagtacaagcttgccactggtctaagttagaaaatatacagatttggggcccacagaaatgtccaattttatactttttttttttaaatggagaggagtctctgagtgagagaggatttggaaaaatggccagcagataacaataacaatagtgactaacatttattgagtacataccatgtgttaactgtgtgaaataattttcatgtaaaccttttggcaacctaaggttggcagcatggaagctttgagagtgtaagtttcttgtccagaattttataactagaaagtgacagagcctggattccaacctatacccatggacaccagagtgtctatatgtgtctttccagtgagcgatggttcacactcattggaaacatgagtgccattggaacatactagtcaatatgatgccgaaaacagtaacagaaagagtgcaggtgttgaatacgtgttccttttcacactggaaagaaagatggtgagaagttggcatgtcttccacgcaattccatcccatcagctggtctccaaattcccactcctcttggttcccacttctctttgtctctttccagaaggaaacaaactccctgatgaccctcactgaaaattcacaaactttacaaatttcaatagattagctgtggcttctttttaaaatactcataggtagctgggtcctggagagctctaaagccctctaattttgcttgcagacggaagaagggaaactcgagtcactggagacaaaggggcaaaggcatgggtttggcggcagagggaaagaaatggtctgtgaccagggcttaagctgcctgtgttggctctgagtgacagtatgctcttgctccaaggaccttaattggctgatagagtgattgctttggccaaaggtccaattaatactcaagatttgaggactggttttccaaccccagttggatgactttcctggcaagcaaaggttaccgctgtaaattcaacttgcttccttaactgggcacccactctataatgtgaggctatcattctgtctggttaattccagacaagactttgtgagcagatggggaatttggattttcaaattcgaaaaaaaaaaaaaaaagcataagtgagtgtgagttttatgtagttacctcgatgctccaccttgtggaaaatgtgctaaatcccaatgtaggaggaggcaggattgcaaatgtgaagcagagtggttggcccaggggtttatgctcactgagaatgttctcatcaatagcttgctgtgattggctatggacctattgaaatcaccattaaactagaaaacaaagttactcagccctcgtgtggaaagtgtctaagacagtaatgcagaggccgtagtctgaaggtggcacctcgcactacagaacaatggtaggagctccaggttcggatcatggttctgaatttactagttgtgtgcacttaagttgcttagtctaattaataaagcagggatgataattcctctttacagctttgttgcaaggattgcattaaagaaaacatgtaaaagcataagggcattcaattaatgttacaagagcccttccctcaaccccaagggcggctgcagctgttcagcctgacactttatgtgtgttggtcacagtgctgtcttggagaatcacatacgggatagtgcttacctccccatagcagccacgtcatagcaaatagctcattagcatgcagtttcttccctccctgttcagcagcccagcagacaagctgtctcagagcctggatttcagcatgttgcactcaccgcaaatatcctgcaggctgcccactccattctgctgcccttcgcaaggcttcactttgccctccaaccctttttttctcttgtttaccagatggaacgaagtctgtttgtggaaacacccttcccctctgtttacttggacctgattttgaaagtaacaagtcactttatttgggctggaggaaaaagcactaaaccagatgttgaggtgaccgggattcctggaagacattcttctctccaacgagacacatgatgcatgaagtaggagcccctggcaaggagcccaggctgccatggcctcgctcgctcctgcttcccggcatggccccgaggctagctgcctctgtactgcctgagcatcgtcccctggcgtgtcaccagactacccactacctgtgcttgcacctgcaggtgggcagttcagtcgttgcaggctgaagctccctgtcacaggagtccatcagcactggagtttaccaaatggcccagtccaggtctgtgtcatattgttttgcaaaagcaagaaaactcattcagagcttgttacttttatccctgacttcctaagtgagcagtgtagccagagaactacatcccctgacatcctttaagagccatgaccactcctgcccttgctttgtgacaggcactcctggatgctgaagtgctgttgctgtgcaccactatgcatcctgtgtgaggatgagcactccagtccttgctccctcttcccgtggctggctcattagccagagcaaactgtggccttgaaggagcagaaggagcatttgactcttcccagctctcagtctttggaaaattgagcaaagtggaatgaaagccatttattcatttaactggcagttatttattgagcatctattatgtggcaggcaccgtggtgacactgaaaagagaagggtgaacaaggacagtcctgagctcaagcaggctgctggcaggtggtagtgggggcagacaagcaaaggggcacccatgccatggcctgcaatgcaccacctccaggacaaggtttgggacccatccctgggtcttgggggacattctaaaaggaagcagtggctcagcatagacctgaaggacaagaaggcaccagtcatgtgtggagtgggttggtggagatgcgcagagtgcaaggaggtctggaggtgagacctccaggcagaatggagggaggtgtgtcccatagcatgtggactctaaggggctgggagatcttaggggtccctggaggctgactgaaggctggccagggagcctgcctggtaagggcctccaaggtcaggtttgggtgtaagagtagccatttctagcactggttgaggtgcacttccctgtcagtgccccaaaatccttcagcagtgtctgatacgatgttctagactggcattgtttccagtgcaggccctgtctcattcttcaggaagcatgctcatggcaatacccggagtctccactgcaagaccagagtgacggaggcagcagagctcctcagcaggccaggagtctccagaggcactgccgaatgtctaagaagcaacctcattgtattcccaagacctgggaatccaggtctcgcagatacgatgatacaatctatagccaggacatctcttcatgtgtagttttcaatgaatactaggataagcaactatcccagtcttcccaggattgaggggcttctccagatgctgcacttctggtgctaaaaatgagaaactgaaatgaattagtcacccaaggaatgctgaccctgtgctatatgatcacatttactctttaaagcaatgctttgagaacaattgagctgcatagtccctgcaatcttataaaggcatttggcctggaagatgctctgcagccatgtgccaagaataacggctatagggacaatgtttcattaaccccaaagcagcaacctgaacctcttactgtacaatatctgctccgttcagaattagctcgacttgagtcacaggatgaagcttaccaaaaggaatttccacgtccaaggaaggaaccaagatcactgagaggttatagtatgaaaagtgaagagaaaaaacctattctaaacattttattaattgtcaataattattttaaaatatttaatatagtctcctacctggtccactggcatcaagctgccaaatttacacggtcactttgggaagccagctggcaggcaaacatggaaagtgctggctcctagcgtagtgagaagaccacagatagatggtaattttcttctttgttttatttttctttttcttctctccctctttttcttccctcttgcctttccctcccattgcccactttctttttttggctgccgaagatttattgcctttcagtacttatagatgatgttttcataagttctaatgaggtcccagcagtttttaacaataacaggacattactgttcctaagatatattatgtgttttccctcatctttctcccttgaatgaaatgcttagaagtaggctaacccccaattcccttccctttactatgataaatggctccattacttaatagggctaaatactctgctgtgacttttatactgctgatttgaataaaatcttacgaaaagct

SEQ ID NO: 328 - DNA, 388 bp, Homo sapiens
aagaaaatccaaatttataaattgctgggtccatctctcttgccatccagaaaagtcagagcaactggtcttgctggttttaagtgttgcctgtgtttctggcattggtcacaaagcctactgcctgctaatcggcaagtggacctgtttctctaacaatggcccgaaacttcacaacatcaaaggagaaatcattgccagcaaaagcatttccgggtagtaggaaagaatacaagtgaataacattagtccagaagttttaataatattctttgctggttgaaattcatgtttaatatgatgtaaattacttgataagcaaattaagaactatgctactacagactccaaataagacgcaagaaaaatgagaggaaatacattaaag

SEQ ID NO: 329 - DNA, 289 bp, Homo sapiens
aggtgctgggctacctgactgctagcagggactgagggagggcatttcttgaagagttacccagatccagctgcttatctgcccctggccatggtttatgttgttgactgattgcaccagctgctgagaggtggttttatgtagtgtgctgcaggaggcttctcacatgctttgggatatcttcagggaaatacgctcttaatagaaactgagaatttaagattatacacagacgcaagcctaccatcctgtagcgtgtggacctagggcaaaattttctcattatttg

SEQ ID NO: 330 - DNA, 672 bp, Homo sapiens
cctgtgacggattttaggcttgaaaagtcgggggcgggggaatgtaaccaggactctcccatccaaggcatgcagactggggaatgtttcggtgtacaagagatgaaatagggatggagtgccccccacgttctttctgcaagtgcctatttgtgagtgtgtgtatctgggattttcagtgctttaccggggctcttgtgcagagtgcacggtgaaggctgcgagggtctcactctgttacccaggctggagtggtgcaatggcacaatctcagctcactgcaacccctgccactgcaacccttgcctccaggttcaagtgcttctcttgcctcagccttccaagtagctgggattacaggcacctgccaccacacctggctgatttttgtatttttaacagagacggggtttcaccatgttggccaagctggtctcaaactcctgacctcaagtgatctgcctgcctcagcctcccaaaatgctgggattacaggtgtaagccaccatgcccagccaggtatgcatttcatagtgtatgaatcatacctcaaaatttataaaaataaaaaaggattttaaaaaatgaacagccctttaggtatgggaggaggcgaggagtaagaaaggtgaatggactctgcattaccacttgccgatcgctagatgttac

SEQ ID NO: 331 - DNA, 1131 bp, Homo sapiens
attttggtttgtattttgtaggtgtccatctcttcacagtcatggctgatcttgtcatccacttttgggagattctcctgtatctgggcagggtatgccttctctacatcaggatctcattcccatcacccagaatgcagtgctgtggcacgatcacagctctctgcagcctcaatttcccaggctcaagcaattctcccacctcagcctcccgagaagctggaactacaggaatgtgccaccgcatcgggctaatgttttgtatttttggtagagacagggtttagccatgttgcccaggctggtctcgaattcttgggctcaagcaatcctctcacctcagcctcctaaagtgcttggactagaggtgcaaatcaccatgcctgaccctttatctctacttttggccagaagcaatccagttaacactctatcatatattattcctcctactgttttctcctctctaaattcttcagctttggctgtttgcccattagtcactgcctgggagttttcaacttttaaaatttgtgacaacattgttaggtcattaagatgggtcctcatccgatgtaactggcgttcttacaagaagcagggaaatgacgtggcggagacacaggagggggaaataccgcgtgatgatggagttaaagacaggagttatgcagctgcaagccaagaacaccaagggctgctggtgacagcaagcgaggagggagcctggccctgctggcatcttgattcagacttccagcccctaccactctgagagaataaattcctgttgttttaagccacccagtttagggtgctttgttgcagccgccttaagaaaggaatacatcgtatcattcccagaaactgcttgagtcccagggtttgagactggaaagtgctgagcctccctcactaccagatgccaccttggcgagggtgagtaggtaggaaaggctgagcagtgaccccacattcatgtgctatggcacatttgagaacataccaaacaggaaatgaaactgatgtgaaacagaaatttccgtcataaaaacaatttgcatgaaacgttcactgtactaaaaaagtagatgatttaggacaattttaacttttaccctgaaaataaat

SEQ ID NO: 332 - DNA, 766 bp, Homo sapiens
tccagattcaaacggcttctatggtggattcacacaaaagaaattagtagaagaaagaattttgctaaatttcttttcagaaagactttactcatttatcagcaataaatagtatctgttatgagttaaattgtgtctccaaaaagatatgctggggtaatagccactgggaactttgaatgtaatcttatttggaaatagggtctttgctaatattatcaaattaagatgaagtcatatcaaattaagtatgactgtccttataagaggagaagagacacagacacagaggaaagactgccatatgaagatggggcaaggattggagttacattgctacaagccaaggaatgcctggcactaccagaagctggaggagacaagggaggattaatgtcctttaggagcttcaaaggaaatatgtccctctcaacaacttgacttctaatgttgtgatggttaatactgagtgtcaacttgattgggttgaaggatacaaagtattgatcctgggtgtgtctgtgccaaaggagattaacatttgagtcagtgggatggaaaggcagacgcacccttaatctgggtgggcaaaatctaagctgctagcatgactagaatataagcaggcagaaaaatgtgaaaaagagagactggcctagactcccagcctacgtctttatcctgtgctagatgcatcctgtccttgaacatcagactcttaagtccttcaattttggaactcacactggctctccttgctcctcag

SEQ ID NO: 333 - DNA, 369 bp, Homo sapiens
atgaaaagatgacaagagcacctcaaaggcagcagcctcaaggagcagccatggccccagacttgtcgcacggatgcagaaaacttaatggaggaggctgaggtcagaatgggaagagtttttaaaaaataaaaaggggagctaatatgtgaggaactgattgctgtgcattattttccactgaacagaccttcttttaacttctaatctcaagcacatagcagctgttgttttcatattaaagatcagtaagtgtttgttgaatgaatgtataaattcttccccaatctctgttccatgtaataagaactaagttagcattcaattataaagaggacttagaaagtctgcagacatttttgatcaaaa

SEQ ID NO: 334 - DNA, 1119 bp, Homo sapiens
gcccagctcagttcctcattttataagtaatgtttaagagcaatgacccactcctactttcagcaaagaggtgcacatagcatagacccatagaagaggaaggatctgagaaggagtttgaaaaaagtgtaggagaggctgcgagaaaacaaggcaggtgtcctggctgagggcaggaaggagacattgcgatggaaattgtgccccattttcttggaggattgggaagaggacctgtggactgggcggcccacacaactgctgtaacctcaggcagttttcaagcagattgaccttcctgctggaacacggcacatgagggttgcttggccttgcctccaccatgcctgacactggcgctctgctgggaggaaaaagcttgctctgttgctggctgtgtggaacagagagggaagtggcagacagtctgggcccagcacttgggtatcgtgctctagccatgcgactcatctctccagttcagacctgcccctggaaaaaagagcccagacctcatcatgaatgctttcctaggagaaaatgaacagctggacaatgctcctggtcagtaggcctgaaggatgctgggatgcagccctcaagatggaacagccaggatgccaagtatccctcttgcccagatcctaaggcactttttctactgatccatattggcctcaggagatgtctcaacacagcaccccagccaatggagctgccacataagatgaactcttgatcatctctaaactagagagttaaactcaacactagcaaacgactttgggtttatgcatatgtcatgttttctctggcaactgcacagaatcatctctaaatatcacatctatggttggcaggagtggcatgtataatacaaaatgtctggtggccctactgtcacaaaacctgtataaaagtaaattcacaaatggctttttagaactgatgacaaaaagttactcgttatcacttttctaattaatttcctaaaagggcaatttgaaatcatactgggattctcacaattttggttgacagtcaagtaaattgcagctacttatcaagcacttttgaatgaatacatgaagaatgaataaaatgaaagctctcctgttg

SEQ ID NO: 335 - DNA, 1198 bp, Homo sapiens
tcagcatctgccgacaggtctacctaatcttccaaactctgtgtaaatcctggatccaccatttaccagctgtgtaaccctggacaacaattccatctttctgacctcagtgtctttctctgcaaaacagcggtaagaatgatcctacttcaatagagttgctgtgaggattcactgagatcatgtgtaccaagctcctacaatagtactgaacccacagccatggatcaagaccattaacttataatcagtgatagccaagaggatgggaagagaatattaagcctggtgctctgcaaattaatacttgcagcttaaaaatacgctggacatgcgacaatggtgctgagtactttgggggaagatcacaacagtcctggtagcagtgtcacagcaaaatatttcagaggtaccagatgagctagctccaaggcaaatgaggcaatattatgtttaactgtttgttcggaaacttcttttattaaaaaagattttaaatattaatgctattttcaatacaggtgtgataacactcaataaagcatggtgtacttgatataaatttcggaatgtaacagtccatctagttcctggtcccctccagtctccaccacatagcctagtagcaaaacgtacacacccgtttaaaaatgaagaagcttttgggcattgggtgagcacagtggggtggggcaaggaaagtgctcgttcctgaattattcatgcttttggctttgacttcagttagtaacatcaattctaagagaactgagacaaactcttctatgttccgcaaaggaatggagaaaaaagcctgccattcgcaagcagctgtgggcaaaaccagcgcagagtacaggggtcgggaaatgagggattaaaaaaaaaagtcggagtaaagtgcacagttactgtcaaaaatatattattttgatcctaagaaaattaaaagattttatctaatggactagattgctgaccttttaatacatttggttttcattgaacatacaatcaccatcggacataaaaagactagtttgcttaaaaaaaaaaatccttggagttatctacaggaatcttgtggacgcaattcaaggataacattctgcagctctttggatattgaatgatgtcctcggatcagtccacaaaagaaacagggacctgttaatgcactgattcaagtgggcgtttc

SEQ ID NO: 336 - DNA, 1376 bp, Homo sapiens; identical to SEQ ID NO: 57

SEQ ID NO: 337 - DNA, 2305 bp, Homo sapiens
gatatctagttaaataagtcattataaatagttgctccgtgggctttccgcatttcaccctgctccaggcagcgtggtctgtatggctccgccctgggcaggaggagaaagaagagggccaggcaccacgtgcctgcactctccctggatgctggaggctgctccgccgtgggcaggaggagaaggaagagaactgggtgccgcctgcctgcactctctccggatgctggaggctggaggcagtgaggcagcaacagcgcgagggcgaggcgactttggagctgcctcatgcagcgacctcgccttccgctgcgcctcctcccagaacccaagaagcctggaacctgtggcgtccagccctgaaaggaggagacggcaacccagccgcgcttttgcctgcactctccctggatgctggaggctggaggcagtgacgcagcaacagcgcgaggcgactttggagcggcctcatatagcgacctcgccttccgctgcgcgtcctcccagagcccaagaagcccggaacctgtggcatccatctctgaaaggagaagacggcaacccagccgaggcactactgggttggggtctccacgaccgagctggtctcatcaagtggcgtccaacaaggggctcaaacccgggttgaggggttgctggagcgacggagaacgtggaactacactggaggacaccagagtactcttaagcaatcccttggccaaaaccagcaactgatttggataccatcaagacacctgaaatcttgtcatgagccagatactgaggaagagattttgggaagaacccaaggaccccccagttgcagccatgtcaagactgacaataaggaagacatcagtcccagcaagcaacattcatcgggcacagccacccatgtggggccagatcaagaagttgacacagatggcggaagaaaatctgaagaaagcggatgaccagctacaatgagtaatctaatgtctgcagatgtggatcccgaatcctgcgagaagtagcccaccatgacgaagctgcctttgcttttatcgctttgcaaaaacagaaaaggggacatgctgggaacaggccctaagcctgtcataaacaggccttaaactgaccatgaacaggatttctgcacgaatgtgacgtgctcctgatggctatgacgcccactgctagaagttgttagtttactggagcagggtagggaacacctggcccacccggagcggaaaactgctcaaaccacaaacaacagcatgagtggcctgagccttaacaacatgtttttgctgcagataatcggccagagactgtttctctactcctctctaagtatgctttgtttttcgtaaggaatgcttttagctaatctgtaacctatagaaacaatgcttatcactggcttgctgtcaataaacatgtgggtcaaactctgtttgtggctctcagctctcaaggctgttttccccctgattcccactttgcactttatttctgtgtgtttgtcttcattcctctagcaccactgggttggggtctccttgaccaagctggtctcggcacatatgcatgtatgcccaggtcctgaaatcagccttgtggagcctgtgggtaggaaaagtcaaccctctgtgcatgtaggcctggaacctgaccaatactgtattttcctaccacgtttggtttcaaatgtggaaactgcccatacggacctactgcatttgtttttaaaaatcctctgtaagtggacctgcacagttcaggcccagattgttccaggatcaaccctacagtagaaatcaagtatctttttcattgtctcttgggatctgccttttcaccaataaaatatgagggctgttgggagcaggcccccccaaatctggccataaactgtccccaaaactggccataaacaaaatctctgcagcactataacatgttcataatggccataacgcccaagttggaaggttgtggatttacaggaatgagggcaaggaacacctggcctgcccagggtggaaaaccacttaaaggcattcttaagccacaaacaatagcatgagtgatctgtgccttaagaacatgctcctgctgcagttaactagcccaacatattcctttaattcagtccatcccttcgtttcccataagggatacttttagttaatttaatatctatagaaagaatgctaatgactggtttgctgttaataaatacgtgggtaaatctctgtttggggctctcaactctgaaggctgtgagacccctgatttcccacttgacacctct

SEQ ID NO: 338 - DNA, 324 bp, Homo sapiens
caaattttatttttaacaatgttaggaggaggaggtacacattctccattcggccctgctgagcttgagctgtcgggcaggctgcaacctgaggcttctgactgcagccctgcagtggggcgctgtgagggtggggcggaggagccacaggacaccagagcatctgctacaaccccagccaagatggtgcagggtccccttccctgagccttccggtctccatggcgacgcctccaaacagcagattccaggcggcaatgacgtcatctctccctttcctgccgcccaggccttggaggtactgctgcctggggccgggggtgg

SEQ ID NO: 339 - DNA, 3371 bp, Homo sapiens
cctcaggtgatctgactgccttggcttcccaaagtgctggcattacagacattagctactgtgcctggcctcaagtcctttctcattttaaaactgcgttattttattttatttttctgagatggaatctcactctgtcgcccaggttggagtgcagtggtgcaatctcggctcactgcaacctccacctcctgagttcaagcgactctcctgcctcggcctccctagtaactgggattacaggcacccaccatcacgcctggctaatttttgtatttttagtagagacagggtttcgccatgttggccaggctggtcttgaactcctgaactcaggtgatctgcctgcctcggcctcccaaaatgctaggattacaggcgtgagccaccacacccggtgggttgtctttttattgttgagttgtaagcattctttttaatattctggatactagtttcttatcaggtacaatctttgtgaatatattctcccattccatggattgtcttctcactttctggatactatacagtacaagttttaaattttgatgaagttcacttgatttctgttttttatgttattgcttatgcttttggtgtcatacctaaaaaaccattgtctaaatcaattgcctatgaggtgttacccctatgttttcttctaaagttttatgattttagctctttgacccattttgagttatttttgtgtatgcagtgcgagataagcatccagcctcattcttttgcacataaatgttcacttgtcttagcattacttattgaaaatactattttttccctatagaattattttatacttatcacaaatcaactaactataagggtttatttctggactcaattctgttgctctatcttatggtagtaccacactgtcttgattattgtaacttcgtagtaagttttggaatccagaaatgtagtcctctaactttgttgttgttgttgttcttcttttttcttttgtagagatgaggccttgctatgttgcccaggctggtctcaaactcctggcctcaaacaatcctcccacctccacctcccaaagtgctgaggggtgagccactgcaactggcctgttctttttcaaaattgttagggctgtattgggtttacctttccctaaattttcatataactgttaggattcacttgcaaatttatgtaaaaagggcctctggaattttgatagtgattacactgaatgagaggagtttggcaggactggtttcccaagaccacaagaccctgtaagaccctgctgataagacaggatgtggtagaaaggccaacccaaaccagccaaaaccatgatggtgacagaagagacctctggttacctttgctgcccattctatggtaattataatacattagcacgctaaaagaaacttctacagcaccatgatagtttacaactgccatagcaactttcagaagttaccctgtatggtctaaaaggtccagacctccccacttctttcctggaaaactcatgaataagccacctcttgtttagcgtatagtcaagaagcaaccataaatatagccagtcagcagcccatcagggctactcttcctatggggtagccattcttttattcctttactttcttaatgaacttgctttcactttattctgtcagcatgctcttgaattctttcctgaacccacttgacctcttgggctgagccttaaccttggggtacttttgcctataacaaacatacaaagataagtttggctgggcgcagtggctcatgcctgtaatcccaggactttgggaggctgaggatggtggatcgcttgagccaaggaatttgaggccaccttgggcaacacggcaaaaccctgtctctactaaaaatacaaaaattagctgggtatggtagcatgcgcctgtagtaccagctactcggaaggctgaggtgggaggatcacttgagcccgggaggtggaggtttcagtgagctgagattgtgccactgtactccagcctggggaacagagtgagaccctgtctcaaaataaaaataaatttgaggtgtattgccatcttaacggaagttgttactggtggacggtatccaagttactggtggtaaatctgcagcaacctcaattctttcctcctcagaagaaagaatttgactgaggggcataaggcagaaggagggaccgaggcaagtttcagagcaacagtgaaagtttattacgctttaggctgggcatgagccaccacacccagcctacattactcaatttaaccacgtccacctagttccctagacaaactattgctaatttaacttttaggaactactgccatcttgcggaactttgaggttttgccaccccagaatttcctagctgctctgttcttctattatgtggcatagcaaacacaaaatgggtcactttttttctttggagatgggatctttctatgttgcccaggctggtctccaactcctaggctcaagtgatcttcctacctcagcctcctcaatagctggtactataggagacagcaccacactgcccgggcctggttgcattttacttgtctagctatcgtctctttcctgttgactatctggaaatctctgatggggtctttaacagaaaaagtctactccttcagaccttagtttcatgccatataccacatatgacaggtctgggaaggtctggaatgtgtggataaaggcgatggcagtggctgctgccatcatgctggctgcagcagggaggcatggctctgggtgcacactccacggagctggtgggtgccccccaccttctgagttggagcgggagctcctcgggtgctgctgcagctgcccaaacccagccacccagactgcggctgtggatctgagcccccctgtgctcttggaggagggctgggagcaggcaggatctgccttcctgggtgcagagaccagcttggtcacggacaccctaacccagtggtgctagaggaattagacacacatacagaaatatagagtgtggagtgggaaatcagggggctgacagcctttagagctgacagctccgaacagagagttacccacatatttattgacatcaagccagtgataagcattgtttctatagattatagattaattaaaagtatcccttatgggaaacaaagggatgggccgaaacaaagggatgggttctggctagttatctgcagcaggaacatatccttaaggcacatatcactcatgctattgtttgtggtttaggaatgcctttttgcagttttccgccctgggtgggccaggtgttccttgccctcattccggtaaaacaacagccttcagcgtgg

SEQ ID NO: 340 - DNA, 775 bp, Homo sapiens
atttgagaacagcaagtgttttggagcctcctgcactataaaagcaggtagaaaattgaattctgactgctgcacgaccacagttctgtattcatactcacccctcactcccaccacattcctggtgacttgaaagattttccaattgatgaaaacatgttgctctggagctcaggagagaaggtgaagtaaagatctgaattcggcaactcggaagcgaagctccaatcttgaggatggatcagattggtgagggagactgtcatatagagtgagaagagagatccaaggacagaactgcaggaagcatcaatatttgaggaatgagaaaggaagaaaagcctcccacaaaagagatgagacaagaggaatggttacacaggtaggaagagaagcagagatgaatggtgtcctctttatatttcaatcacctgaactcattactcattattgcctgcgaatatcaggtgcttcactgtttctcagcttttactcatacctttcatcttttcaaaaggagttttaaaatcctactcacttttcagagtcttagtggaataccaggtctttcgtcagaactttcctgactgttatcacgatctttcttcctcacattgtcctagtaaccccagcatcatgaaattgaatacaattacattatttaagacagtctttcaacaactttttggtctcaggaacccttgacattcttaaaaatgattgaggattgaccagtctgaccaacacggagaaaccccgtctctactaaaaatac

SEQ ID NO: 341 - DNA, 2432 bp, Homo sapiens
aattagagaaagtgatgtggtaatggaagaagaggtcagagagggagatttgaagatgctgcacttctggccttgaatatggaatcacgagaaacaggaccttgccctgtcactcaggatggagttcagtggtccaattatggctcattgtagcctcaaactcccaggctcaagcagtcctaccatgtcagccttcccagtagctgggaccacaggtaagcatcgtgacactcagtgaattttgtttttatttttttgtagagatggggcctcagtatgttgccacggctgaccttgaactcctgcactcaagggattttcctgccctggcctcccaaagtattggtattacaggcatgagccattgtgcccaccgtctctggttcttaaccttctacttccctcttccagttttaaagaatgcttgtaattacatgggctctcctagatactccaggataatcttgttttaaggtcagctgatgagcaacattaattttatctgcactcttaattcccccttcctatgtaattgtgctgtgtaacataggacatgagcaattggtgggggtgggggttattactttggccaccacagtattttatgccaggtactcagctaagcactggtgaattaagcatgaataacacacactccctaatctccatccattcatgggaggagcacctcacctgccatgctcctgagaatctggggagtcaaagaagtcttccatgaggaggtgatgccaaagcggacaagtgacagagtcgaagctagctaggaagagagtagaggtttaaggggaagcgtattataagcagaggatatcacccacttcagagactcccagaggagaaagagtgtgtgttcaaagggcagatgaggctcagttggactccatagcagatgaaatggagaggggcaagcaatgaggctgccttgcaaggcagggcagagcaggggctgttgaagggtttggacttaatccctgaggcaaggagaagtgatgtaaatgggggagtaacatgatgagattaatggattagagacatggctcaggctgctgtagagaaggcaccagggagagcagatggctcaatgggtgtgtaggagacctctcactgagtttagggagaggtttttaaaacagaagaagtttgagtaatttaaatgatgatgggaaggagctaaaagtaggggataggttaaagatacaggaaagtgggaggaagaactgacaagtgaggttccagagagggcaggagaagaggagattcccatagggggattaacactttcttttcttttttctttctaagacagggtctcactctgtcgtccaggctggagtgcagtggcacaatcttggctcactgtagtgtaggcttcccaggctcaagggattctcccaccccagactcccaagtagctggaactacgggtgtgcaccaccaccacacctggctaatgtttctttttttggtagacacagagtctcactattttgcgctgattggtctccaactcctggcctcaagcgatcctcctgcctaggcttcccaaattgctgggattacaggcatgagccataatgcctggcctctgctagttctgtattctctagagttgtctttactttgtgctagcgtgtccctcattgtgctaatcctctgtaaaaattaatacctttttttcttttcgagatggagtttcactcttgttgcccaggctggagtgcaatggcgctatctcggctcagcgcaacctccacctgccgggttcaagcgattctcctgcctcagcctcccgagtaattgggattacaggcatgtgccaccatgcccagctaattttgtatttttagtagagatggggtttctccatgctggtcaggctggtctcaaactcctgacctcaggtgatctgccttggcctcccaaagtgctgggattacaggcatgagccattgtgcctggccaaaattaatactttttatattaaatttacatatatatacatttttttctttttgataccgggtctcacactgtcacccaggctggagtacagtggcataacctctgctcactgcagcctccacctgccaggctcaagcaattctcctgcctcagcctcccgagtagctgggattacaggtaagtgccaccacacccagctgatttttgtgttttttgtagagacgaggtttcgccatgtttcccagactgttctcaaactcctgagctcaaagcagtccacccaccttggcctcccaaagtgctgggattacaggtgtgagccaccttgctcattctagtttaaactttggagtggtttgtgtctcctgattggactcctgcaaatacagaattgatgctaggaagggtaccaggagatagacgcacacagatgggatttgggaataggt

SEQ ID NO: 342 - DNA, 447 bp, Homo sapiens
gtttcatcagaagccggaggacgggcgccagggggcaacttcctacaggagggcgtcccgttagaatgacagggcttttgcaaaagtctgacacccgtggcacagagcgccccagatatggagggtttcacaggctcatgtgtggcttcttcagtcctctcttcattcactcatgtattcatttattcaacgacatattactaaggaacctccttaagccgggatgctgaacgtggaaaaatagttgactcttgaacaatgtgggggcttggggcaccaaccccctgtgcagttgaaaatcgacatataactttgactcgccaaaaacttcactacaatagcctgctgccaacctgaagtcttaccaataacatcaacagtcaattaaacatattacgtatgttatatgtattctatgctgtagttttacaataaagtaagctggag

SEQ ID NO: 343 - DNA, 1436 bp, Homo sapiens
gtaggacctgcctttcagtaactttcagaggcatggggagcccttccctgaaagagaggagaaggtgacatcttagaaactgtgataaaatgatctcaggacccaaaaagaaaatggacaagcctggcaatgagagtttgcaatgtgatgcaatcacgggcaataccagggtggaaattggatgggcagctttcttctctctagaagattttctttccaagtccattctttcttttcatattttcatcagctttgttcgtaattgtcaaaacttggaagcaaccatgatgccgatatccttcagcaagtgaacaaataaattaactgtggtacgtcctgacaatggaatattattcagcactaaaaagaaatgtgctatcaagccatgaaaagccatggaggaaacttaaatgcatattactaagtgatagaagccaatctgaagaggttacatactctgtattccaagtatatgacatctggaaatgacaaaactatggacaccataaaaagatcagtggttaccaggggttggggattgggggatggatacctggagcacagaggatttttaaggcagtgaaactagtctatatgacactataaaaatggatacgtgtcattatacatttgtcaaagctcataggatgtacaacagcaatagcaaactctaatgtaaactgtggactttgagtgattatgatgtgtcaacataggttcatcggctgttaacaaatggacccctctgatggagctataaatatgtgacaacttgaattctgcttaatggacttcctttctttcttatttcctttctttctttctttctttttttcttttttttttttttggtttgtttcttgcatcttatgttatctctatggtaagtttagctaaatgaaaaattcccaggattgtaaactgattgattagaaattatttgatttttctttatttcattttatgttactttttaagacccagtcaaggaacatttccatatgatgtgcgtgtatccatagaattatatcatggctgcatatgcagttttagcctatgctataaaatgcctgctttttaaaaaaagacgttattttcttagaacagttttaggttcacagcaaaactgaaaggaagttacagagatgtcccatataccccttgcccccgccacacatttgaaacatcttttcaaatcttttcctcatttattaaatagcttgtttttctcattattgagttgtgatatatctttatgtattctgaataaagtccttcgtcagatctacatattacgaataactcctctcacttcgtggcttgctttttaatgttcataatgttgtcttacaaagagaaaaaggttttcatttgataaaatacaatttttttatttttaaaatttatgattttgtgttttctgtgttctgtgtaaa

SEQ ID NO: 344 - DNA, 6644 bp, Homo sapiens
agtttacagaaaattgaatcgaggtttcctcattgaatcctaagactcaaagcagacaacatgacaggacacatataactaacacaggctttaaacaggtggaggcgtgaatggagtactattcacgacattctaaagctactggagcacgggacacgtgtctgtacgctcctctcacaccccttactcggcagctgccccactcccgccgttgccgttgccctgagtcttccccactgttctgctgtgccagtgtgagcatctccccggcactcaagtccatgttctctccctcccgctcttcctcctgtctcttccatgctccctgttgcacgggacatcatgtgggcttgatgccgtacacagtccctgaccatggccccctactcttctccagaagtgtcacactagacaggagctgctgagtcaccaactcacctttccctagaatgtgggtttgttttttctcccccatcacttgcagaggtcttttttcaattatatgatcaagaatgagtctacaagaataccagcaccagacatagtgccaaatggccttttgtaagctgtttcgtgcccttgaggctcgcacttgtgctgggtgagcccaggaccgttagccttttcttttctaggtctggacactccggggttggttaggctagccactggggagaatacagctctggccttttttcatattttgctgcttctctttgtacagatctttccccctccacataccaaaaggaatcctaacctagttgaaatgctagttgcaattcagtttcatgagaatgctgaagtaggctgctgatttaaaattttcctcttccctgaaaatacacacacctagagaatttagggaaaggctcttagggcttgggaatcttatcttttcattccccacaaaatacctacaaagaaatgtctagtattccctcagtattcctcctcgtataggctctgaaagcaacctcattcccacccagcccttgcacaccggcattcaagatccatgcatgcagttgttgaaactgttttctttgggatcctatctttatgacaactggaatgattgtagatttatgacctcaaagagtagagcattccttttcctattttcccagctgctaaaatatgactgtctccattagaatttagaatccgtcttaagcttagagatggtaagagctgactggatgagtctaattctatgatttgtgagacatgcattaaaaccgtcagcagaacattctgatgatccacctacactcaaagaaaacacaattaacaccacagttaaaaccttctaatggagcccctgtcttagggatcaaggtattagaggtgctgcttcagggatggtgctacttcaaaagaactgaagttggagagacacctcccttcccaaatgcttctgcaggccactctggtgattcagaaaaccccaaccatatattcctttaccagcagcgcccacccttttccgtaactcagcttaccaaaatcagtgaaaattgagacagtgcttacccatgaaatatgtggtttttgaacaaaaaccccagaagttagttattcttataggaaactaaagatgccaccattgtaaatcataatactacagagacaaatgcacaggtctcccaaccacctcaaagtcaatacagcccatgttttctgagcacgtactgtgtgctgggcaccgtgctggacatgtgtgctgcctcatgacccgacaccaagcaagtcaccttgcccttggcaaggcaagtctcccctcatttctttcatttcagtaggacgttcatcttcaaagaacagaccacataggatggtctgccctctctgaacactaacctggtttgctttctcacgcagcagtgccaggtagcctcccaggcgcactgtggcatcgcccccgcctctgtgagctgaactccctccgtgagggtctggacgtgagggcccctccagagtcttcctccctggtcagtgatgatgacaggagtgcagggaggtgccgcagtggttgacagggtgggaagcctgtgtggccgaggggaacttgaactccggcaccccttgcctgcagttagccaaggcagagaccaggaaaccctcttgcacttcccatcttctctctccagctcttgtagcgctaccctggccgttccttcggggctcctgctgtgttcaggagcatcttgctcagctggcccctcctcctctctagaaaccgggggtctggggttctggaattagatcagtgtctgctctgcctcaggcctccctgcctcctcatgggccctgactgccaagaaataacagttgctggagacatatcttgatttggggtcagcgtaagaactttctagaacccagaatccagcaaaggcatgagctcctttgaggtagaggtctggttcctgtcctgccacatttcacgtggaactgtggtaacttgtcagggacattgaacaagggacatgggtaccaagctgacctgaggactcagctaactaaagttccacatttcttccctccttcccttgtctacctcttttccgtcaaacgtaagtggtcctctaggggttggctctctcatggtctttctcttctgatctgctctgccccgtcgtgggcatcttggaaccacctcagaagcaaggccacagctgtggactggtcctcgtgagagtctccctggatcctctgtacctgtaataggtacacagttacgttattatccaacctccaatccccaaaaagcctccttaatttgaaagagaaaaggtatatgtgccttgcattttgttatcggtccagattttgcatctggtggtggctggggtgccattgggattttggaatgggagcagtttgattcctccctcggaaggaactcatggctctcacaaaccagtgtctgtggcagtgacaagtcacagaatttgtgtttcaaggcttattccttcttccctttaagactttttcaacttcctgtcacttcgggctgagtctcaatttcagtcatgttttgtggcttcctttgagcacagaaacctctccttttcttccgttactggaactaagatcccagcgtaaactcgtgagagtcatttttccacgtcatcattcgttggagctattaagcccgaacacagaatgacattagtgttatactaatgtaagcagcagccactctggtgatgttgcattgaactcttttgttcttaaaccagattcacggcgggcaggcacagagttagaagagtgggctgcaggaagacacgtgctcagcggtggctgctttcaagcagcattgttttttgccttgaaaaccacatttcattatgttagaatcggtgatccccttaatactgcatctctgaaaatgggcaccatgaaaccaaaaccaaagttctggatgtgggggagtggagcttttctttcgaagcactgggagcttgggcagggcgtcccgactgcccctcagttttgccggagcactcggaagggcctcctcttttcctagtagttgcctcatggtgactctagaaagcaagtgtgtgcagcctgtgcctccccgacccatggcgggcgtctagatcaggccctaggagcctccccatccctgcctcttctagccacttcccggggggctgtagagcacggtcacaggaaggcctctgctgggccgagtctgcggtccctgagccatcacagcactggcgtcttcagacacaccctggctgcaaggcaggacactccccctgccgagagacaccatgtgcgtcatcattgcctcccctggaagagcccacagccttctatgatctcccccccgggctcgccctgccttccacggccatggtcacgttgggtatgcagtacttttcaaggataaatttttgtttatgttttttaagtgcctaagcaagatacagacctctggaacctgccagagagtcggcctatgccctgtccccatccctccccaccctgcactggcccttgagggtgggcacagggcggctgcccctctccagtgtccctggcgttctgcaggcagaacaaggcaaggacaagctagcgggagagatcgcttcacagccatatcaggctggcttcgtcactgttttccagcgtttctttctttagggccgtttctgtttatgtggtttggtcttggttcatagagaatttaagagtctgcttagggaaatctcagtagccactaagaagacaggagagcaagacagcctcagagcagcattccagctctggctttggtaggagttggaaatgtgtccacatccaagagggcgaagcgtcgaatcatcctagctcatgagcctgctgactcacctgccagcgtgagccaccggagccccagctgcctttccgagccctctctgcctagactagagggatcagggtgtctgctcgggagggcttgggaaagccagcaatcaggcgttcagatcccaagtgtgtctttggaaatgagtgtgagagtatttgtttcttttttaaaaaataatttaagtctgacctaaatacggggcctttattctgtgatgggtgtacgacagattattttgtgactgcagtctgttcaaatcacatcactaagcagcgctgagatgatttgttggtgcattaaaaggttttgcatcatggaacaatccatacccaggcactttattttcattaataatccagcatttttgttcagacaatgtaataacccaaacactgggtattcatatttgacacatgggcaaacttgccagtggaatggaattgtgacctgacagagaagggaaggcaggctgacgaaggtgatcgaatgggagaacagtgctgtggtgatcatgagaatgaggcttttctgtagcatgtaaaccaaaccggacccttggcagttcgtcgtccctcagttctccagatgctattttttgcaggttctaccaagtgcttgttgattaccctagttgtaattatctagggaagagatgaatgtaagtgagagtgcagagcactggggagggtgacagtgaaatgcaattagaggcagcaagagagtcctagtctgttctcacataaccggacttgaacgctccagtgcgagcagagtgctgggggtggattccactgccgaaccacggcagctttgctttactcttcagcatgggggtggtaactagctgcacagcaagttatgaaatggaaagcaagcttaacagctgtaatctcatcggataccctggagcaaatgccttgggattgcctgaagtgaagtgtttagcatccaccaaatagttgagtttctaagatgggccatgcgggatccctgccacacgggtgtgggggcagcgcgctcctccctgcctcggctgctgtgtgtgttagtcttcatgtttccccttggcgtctcctctggtccctgtccatcttgtgcaccatgtgtccctgagggcgagtcacacctgtgtcttgagtctgctgtaaggtgttcagtctacctcaaggggtcatcatggtaagctctatcccacggcatcctccgtccatcaccacacacactggaatgtatcccccccgccctgccccttcgataacctcctgaccttgtctttcctataatcaccacaaactcctagtgcaaattggatgctgctttaaatgtgaaaacaattgttcaaaagctataaaacctgaatgaaagctgaagctgaatttataagccttgttgcatatgagccaaaagtgcaaaaagctctatataatgaactaacctgccactcgtataaatataaatatatataaatatattaaaatcagactgttctacaaaattgtgtatttgtatttttgtgtacgtacaattttctgctaagcagaaggaggatgtagtataggatgctgtgagaagagatttggtttaatcctatttctttgttacttatttttgttaacatcagatgcctgtctttgtcttatatgtgtatgacactgtttggaaagctgcagtatctctcttcctgaggtccagaggccattaaagaataaacatggggcttagaggtgtcttggccaccaaacacagccccagttacctggagcttctcagaacccactttgccggtgctaaaacacaagagggggtgaaagtggctgccagtaatggccagaaaccaaccaccagaggccaggctgaaagacaagctccgggtgtccaggggctgacgggccaaccatgtggcaggtcccaggccccacccactgcgccatccgcctctgagctccacagtggtcccactaatgggaacctcctctagggagagtgatactgcaccttcacccgtaggactcatatttataacaatgtgtaatggctgtagcaaaaagcccttgtttctagatgtaaatggtcaaagaaacaagcgctctattgttttgaataaaatagttcaaatgagtcctgtatcattgtatctcctattctggattagtgccttttggacagtagactgttctgtaattaaaatgtagtatactgcttttttgtacagttttgttttaataaaacttttttttaatttgtgtttattttagtattgtacctattagag

SEQ ID NO: 345 - DNA, 1761 bp, Homo sapiens; identical to SEQ ID NO: 22

SEQ ID NO: 346 - DNA, 1762 bp, Homo sapiens
taggaaggagttagaacccaagataaatgcagataggaagaggaaagcatgtttggattgtttttttcaagtggcactcagaaataaaagtttggagaaacatggctctgaagctctgacaaatttgcatttgcaaaaataactcctacaagactttcagaagtctaggaaaattgtggcttttggattattacattaccaaatttgtggagtttaataggtttcaactgtcaatgtgcattaaaatttcctgggagcagggggatgggcttttaaattctgatgtccagtggcatggtcttggcttactgcaacctccgcctcccaggttcaagtaattctgcctcagcctcctgagtagctgggattacaggcgcctgctacctcgcccggcttttttgttgttgttatttttagtagagacggtgtttcaccatgttggtcaggctggtcatgaactcgtgaccttgtgatccgcccgccttggccttccaaagtgctgggattacaggcgtgagccactgtgcccggctgttcatctgtttttcaatacctttaagttcagtttcccttacaaagcccacttttttcttagtgggaatctcttgtaccacttaacacctacattccttaatttttaaagttaaaacacttatatactataaaatggacacatcttaagcatacagcttgatgaagatttacaaagtaaacatgccagttgaaacaccactctgatcaggatgtggaacataaccagcactccagaaatctctctgccatcattaccaccactggttatcctagccactcttctgacttgtatcaccatagataggttttacttgttttgaagccatctataaatggaatcatggaagtttgggcttccctgagagcagatcttcagagaaaaaaaacttgagtgcagtagtttatttggcgtttggctccaggatgcaggagtgggaaagatggtagagagacagaagaaaaatcaatagaaaggtattacggaggttggatatataatgcttcccagaattgtctgactgaacaggaggctgaaatatttatccgctggctcctgtttccaattgattgagggatgcccccaaggaagttaacttcactgcaattctgagctgtaattgactttaataagctccaacagcactgaaagacgtttggattattttcagtttgggataatactactatgaacattcctgtacatgtcttttgagaacacgcatgtgtacatttgtgatgggtatgtaatggggtggaattactggttcatagaatatgtgcatattcacctttagatatagaggctgccaaccatttttctgaagtgattatactaatttatattctcactatctgtaaatgaacatttctgttgctccacatccttgctggcacttggtattgattgatttctcttttaattttaggctttttaatacgtgtgtagtgatatctcacttgctgtttgtttgctttttggtaaattttttattgaagtataatttacatacagaaaatcacacaaattgtgtacaggtgtgatttttcacaccgtgaatacatgcaaaaactagtatgaaattaagagttggaacatcaccagtactccagaagccccatgcatgttctcttccagttactataccactatcccaaggatggtctattaattcaacagcatagatttattttgcctgtttttcaacttcaaataaatgaaataatatgc

SEQ ID NO: 347 - DNA, 394 bp, Homo sapiens
agcgctccaggctcctacgggctgtgcggtgccagggctcgactgctgagcgtcgtgggctccgagagggacgcgggcggagggcaaagtgggttcatgatatgaattgtaaaattggcgactgcgtaatgtaaaacacttaacaattgcttagatttcctttgggaaataacttgcttttaaattgtaaacaaattacaaacaaactgctagtgcttctggatcttcttaccgaaatggctgattcaggaggatgcggggagcgtcagatcaggattgctgaaggagagctgagaatgaaaccaccatttattcagcactcagaatgctccaggcagtgtaatctcattccatcttcattcatgactccagacagttctgcattttccaagtt

SEQ ID NO: 348 - DNA, 417 bp, Homo sapiens
cttctcagaaacaaccggccttgaaggatacaagtgacaagaacgattctgtttcgaacacagccacagaaataaaagatgaacaaaaatctgggacagtgcttcctgctgttgaacagtgtttaaacaggagtctctacagaccggatgctgttgcacagcctgtgacagaggatgagtttgctttggaatctgagattatttcaaaactatacatcccaaagagaaagattatttctccacgatctatagaagatgtgcttcctcctgttgaagaggctgttgacaggtgtctctacctactggaccgttttgcacaggctgtgacaaaggataagtttgctttggaatctgagaatatttcagaaccatactttacaaacagaaggactatttctcaacaatctgcagaaaagt

SEQ ID NO: 349 - DNA, 4901 bp, Homo sapiens
ctcggttcgaccaggtctggtgaccggcgacgaggggccgggctcggcgccgggggtcggggaaagaagaactaggtctggcagtagatcagaatctacctgttggggaaaaccagaaataggaagaagagttattaatggttcattcttggctgagaagaattcagtatggaataattaaggttagtttagagaaataatatatgattatgttaaggagttcacaaatattattgaaagtaaactggttaaaactgatttgttaatgtaaatggggccaataaaccaattagatgatctcgctactaaattgatgtgataatagaggatatctggagggaagtaaaatagatgataaggttagtggtaatgagacttcattaaatcctagtactaaagagatactgtgtacattagtgacagcttaattctataaataaaagttgatgttaagaattgatatggggcctgtggtgactcacacttgtaatcccagagacttgggagtctgaggtgggaggattgcttgaggccaagagttccagaccagcctgggcaacatagtgagacccccctctcattcactcataaataaatacataaatagcaagcccaatgtggtggtgagtgcctgtattcccagctacttagaaggctgagccaggaggatcgctggagcccaggagtttgaggctgcagtgagatatgattgccccactgtactctagcctgggggacagagcaagaccccatctctaaaataataataactgatacaatgttggcactgctgaaattaggcaggtattatttgtgtaaagagttgtaacaaaaggacttgattaaagagcccaggctccaaactcatttgaaattccaggtaaagtataagaataataattcatatttgtatgggactttataatactctgaatgttttcatatacaagatctcctttgattcttataagaactcagggtaatagtagtacaggtttggaggttctgagaggctaacagacttactgaagcaaatagggactaaatgacaggagtgggacttgaacccagggctccctaccaaaatgcttttgctcactgtgttgcttttttgtggttgctgtaacaaattactacaaactaggtcgcttaaagcaatagaaatttattctttaactcttttggaggccagaagtccaaaatcaaggtgttggctgagccacattccctctggaggctctttgggggagaaatctgttccttgcctcttccagtttctgttgtgtatggggcattccttgacttgtggctgcctcactccagtctctgcctctgtggtcattatagccttcttttctgttctgtgtcttctcttctgtgtgtctcaaatctctctctctgcctttttcttctaaggactgactttaagagaatctacttgtcactggatttagggtacacctggataatccaagatgatctcacctgaaaatttttaattacatctgcaaagaccttttcttcaaataaagtaatattcacagggtctggggattgggatatggatgtgtcttttcaggagccaccatttaacccactaaattcattatatgctgtttaatgctgtatcttccttttggattgaagagatatgcttctgtttgaagatgggcaagtgggctagggaatttttggctagtaggtagaaaggaactttaaaaatatttctggttggtgctgtttagtaagtgcttgttaaactttcagaggtcaaatatcttgaacacaaattggagaaggagtaaatcagtataaagtgaaaaatatgatattttctccaaaaggcagtcactgactgctttggcagaaagaattgaggtgattactcaagagttccaccaaattgttgtgctagcttttacatttgcaaactataaaaaacgggactaaattaagtagcagctcactttttttattaacagtattacaagttgactttttcatttcttgtgtaattgagataaaagggggggtgtgtgtatgagagagagacaaagattttgttaatggttttagtatgattcatttcttatgtcatatgggcattctaatttgagtcatattaattaaggtgatctatgtatgtaaactctttgagggagggacttggcatgccttgtatacagctagatccccagtgtagttccggacacgtggtagatgtgctcagacaacattagctgtatgaatgaaagaacttcttatgatacccaaatctggcagccacaagtctcattacaatttactttatggagggtccccattggtaataaggtctattaattgtagaattgtccctgctgactttaagagacttcactctgtgtccttttatgctgacagagcctacaacttttttcatctccaataatcttcagctccaggccaaaaaaaagttgttcttgccctgctcacattaattgaaataagtcagtgagattccttctgcccaccacctcacttctcactagcatggggctcagctaccattagagatgttagagtggggctgttgtgcagttcttcagactattagtgctgtatgctatgttctgaggagggttcgggcttttatcttctcaaaaatgtgtaaaattttgactcactcatacagctttagatgttaacagatagaagtatactgactgtgtgtgctaggctcttccatgtattatatcagatgttgcttccagccaacctgagaagctaagtactaacattgtccctattttacagaagcataaagaagttaagcaacccaacctaagttcacaccaaaatttgaacccaggtagccttacttcattcagtgcccgtgttcttaaccatgtccaatgacagcctcaagctcatttgtttataagtaactcgttcttactttctaaaagcttttctgttttctttattttgaagctcagaaattagaaatctgactaggatatatatataggtatatgccctttttcatttatcctgtctggtactcaatgagcccttttgatttcataattctagtctcctcctgagggaagttttcttgtattatgttttgattattactttttccattatggtccttgttctctctctgaatgccttttatttccaattagacctcctggacctgctggttagttctctcatctttttattcaagaattccatttcttttttttttgctccagataatgtgatacacattcacctgcttttccagataacagatttgttctttggagggtctcctgtactttttacttcctcaattgaaatttaaaatttataaatcatgtttaaagaattacccaatctattattttgtttcagttattcccttgcattcaacagcatatacaaaataaaatatacaagtaaacatggtttattttagaaatgtgagactatttcaacattaggaaatactaatgtaagatatcactctaatagatcaaaggaaaaaaacttagaatcattttcacaaatactgcaaaggtatttgataaatcactactcattcttgataaaaaccaaagaaacaaaaaacagctcttgttaatccaggaaatgaaggctattttcttaacagtacagccaatatcatagttaactttgaaagttaattttgaaatacttgagcaacattccctaagagtatcttcagaactgtagatctgatgtttatataaaaaagggtatcttggtgtattagttagggtaaagcgagatgttacaacaaataccaacttttcagtggcttaataaaatataaatttatttttccctcatgtaatagtccactgcggatgtttctggttggcagacagttgtttttttctgtatggtaactcagggacataggctccttccattatagggatccaccattccctagggccttgaattcttctgtttccagtggacagaattgcagagatagggtggagaatgcatactttcttctcagttaccttggcctggatacgacacacatcagttctgttcacattcccacattccattggccggaactagatgcgttacctcacctgtctgcaagatgtgtgttccaggggagggaaatggaaaacattatctggctggggaaccacaggtgtggtaacagtctcatttgtagttggaaggagtagaaattaggaatgccttagtggaggacactgtgtgatatctgtcaaattttaaaacatacatgttctttgacctcaaaattccacttccagcaatttttcctacagatatacccacaaatatatacatgtttacacttggaggatatacctagtaatattgtaatagtaaaagattggaagcattctgaatgtccatcaaaggggactgagttggaaacattctgaatgtccatcaaaggggactgagtaaattattgtttatccatacattgaaacactgcagccactgagaggcagtgatatatgtactgactggggagagaaatgcaaggtacagaaccgtgtgttcacagctaccatttacttaaaaagagaaatatatacatgtatgctcatatattcatagaatatttatggagggatcacaagaaactggaaggatcacaaaaaatgtaacagtggctgcttctggttaaaattataaggtcatgggtcatgggatgagagagtcaggcttttactgtgtcctcttttataccttttgatgtgcacctatttaaatataaaagtcagttgtagaagtataataaataacatggaaagatggctgtaatatattattgcctaaaaacaagcttactgaaaattatgtacaatatgttctcacttttataaataaataaagaaatggga

SEQ ID NO: 350 - DNA, 1201 bp, Homo sapiens
tcaagttcgggaggcgttacctgcggagggtttgaggcaggcccaagagcgagcccatggtcttccgacgcggggccaggggcgggccccaggatccggagcttcgtgcggggccgagtccaggtttggggcccgggaggcggggccagttagggcgactgtccctgggatcgtcgggtcaggccttgggctaacgtaggcactctcgcagttcctccgccttcaggaaggtcttttcagcaggggccttacgggtgcatgcttcggtcctggaggccttatcctagcctcctctccatcagcgccacccgtctggggcccgaaaggagggagctttccctctgtcccccagcctttggactgtcaccaaacaagccattcgttcatcaaatactttttaagcgcctaccatgtgcctgacaagggagatgtaacggtgagaaaaactaggtgtggtccaggcccttcaggggctcaggtgctcgtggaagaagtggacattgaagtacttatcacacaaatgaggataaaagtacgatagcgatatctaccacgaagctgttgttccccaccagaaccaaatgagcgcaagatctgacaaagaaaaaaaaaggttcatcttttattcctccaaacactttcatttaaatcaagaggatgggatgtggttattgctgtgtttttagacagaatcaacggtttctgggtctgagatgttgcatacaccttctcagtccctgtatcctgagatggagtcacctgagaatccacagcaagtcctaaccagggatgggtctgggtgattaaggaaggttggcttcagaactgggccaggggcactgctttgcttttgctgttttgatcagctctctgcctgaaggagacaagaaaaaccaacgggaacagcccagtaaaggcgccattccccattttacagctggggaaactgagttacagagcttgtctgcactgagtcatcaggagcaaatgctagatcagatagggtctctctctctgccacccaggccagagtgcagttgacgcagggcaggggagccccgaagtggagcatagtgtgtccggaactggtgggttcttggtctcactgacttcaagaaagaagccgcggaccctcgcggtgagtgtcacagttcttaaaggctgcgtgtccagagtttgttccttctgatgctcggatgtg

SEQ ID NO: 351 - DNA, 573 bp, Homo sapiens
agcttagaggtggcagtggctctctgcggctgcgatttctttctcggagcgtcctccccatcccgttcggcctctgcctccaccgtcgtctctgtaacccgttccctgtgggagagtctctgttgcggtgttcaggggtttcggttttctggctgaacagtgattaacgcgagggaaggcgctgacggcaaggtggcaggaagaacattccaacacagaccacaacacctatggacctggaaaacattgtgctcagtgaaagaagccagacacagaaggacaatgttgtatgagggacacattccagcaaaaagacacaaagtgacagaatggctgcctttgagtgggggtgagaagaggtggatggcaggtaccagaagagaagggaataaatatatgaagaaatacaaccccctcgggcagtgcctggcacagcataaatgcccaggaaaaagaggcccagttgcttacgttcccggcgacagggccgggaccagcgccggcttcctggtgaaggaggccaccctttcctcttgaggggtctgagtatgcatgtcagcacccggtgggcac

SEQ ID NO: 352 - DNA, 281 bp, Homo sapiens
ctcctcggcccagcgcctacctccccgaatcgcggccgctgggagcggggttcgatcccgtgatgccgcgtgggtgccggccagagaagagctccggaggccggggcggccggcgggcgtgcgaatgtcatctttcccaacaagttgttcccagcagaatcctctctcctggcacaaaacaagcagatgaagagcagccctgagaggtagacacagcggagatttttttcacccgcattgtacagaagagaaaatgaagctttgcccaacctgcaggagat

SEQ ID NO: 353 - DNA, 894 bp, Homo sapiens
gtcgccgcagtcacggagcgcacgtcgggaaacctctcagcctcatctgtaaaatgtgatcataaataccgggtacctggaagtgctcgagacagatctcactatgttgaccgggctggtctcaaactcctggcctcaagcagtcctcctgcagcaacttcacagcaacactggaatgacagaagaactccactgaacattcattgaaggcccagatttagagtgagcggggcaaaccaagttttgtgctgggtggaaggaggggcggctgctgttcagcccacaggattcctgtgaggacaccacatgttcatagttgttaaaccatcttgcaaactcattgcctgatgttcagatctcccggctcagctggtgtctgtggagtacaggatttatgtttcagagagggcatgagcccagatgatgcctcaagactcaggttctaggagagaaagcagtgcttcagggactttgactgcccccgcccgaaatgcagtcgccatctgcaggtaaacagagctggagctggtgctgccggaaaagaaagaggagggctctccggcagcctgcggcttcctcaaggacttcccaggccaggcgctgtggctcacgcctgtaatcccagcactttgggaggccgaggcgggcagatcatgaggtcaggagatcgagaccatcctggctaacacagtgaaaccccatctctactaaaaatacaaaaattagccaggcgtagtggcgggcgcctgtagtcccagctactcaggaggctgaggcaggagaatggcgtgaacccaggaggcggagcttgcagtgagccgagatcgcgccactgcactccagcctgggtgacagagcgagactccgtctcaaaaaaaaaaaaaaaaaagaact

SEQ ID NO: 354 - DNA, 615 bp, Homo sapiens
cggctctggccccggcgccgcgggtgcgctgcggatgggcttggggcgcacccagcgagcagcgagagtcgcggtgtcccgggcgctcgctggcaccgtggccgcagcggccggcctgggagccaggagggcgaggcggctgcaccttcggggccagattggagttcgaagagtggcgggtaccccagaagctcggggccggggcgatggctgcagcctcgggagggtatcgccggatcgaactccgggaaagggaagcaaaggcatggaacctccgcacactggatgagaatccatcttccattcgagctgggaatagactttgtgaaagatattatgtaatggagtctcgggaaccctgagacctctccagcgaagctgaagtgctgtgttacgggagagagtgactggaaagtaacaaagctgaatctttctccctggagtaaggccgaagactggattactacacgcctagacgtgacactacacccatagatctcatgcatcattaatgccatatgacattgccattttctttctcagttcacggacaaaagtggtgggttttcattgtcttcactgattgtcaatgcattaataaagaagatgtgtggt

SEQ ID NO: 355 - DNA, 5977 bp, Homo sapiens
gccggacccctgccccaggctctcagcaggacagccggacccctgccccaggctctcagcaggacagccggaccccttgccccaggctctcagcaggacagccggacccctgccccaggtactcagcaggacagccggacccctaccccaggtactcagcaggacagccggaccccttgccccaggctctcagcaggacagccggacccctgccccaggtactcagcaggacagccggaccccttgccccaggctctcagcaggacagccggaccccctgccccaggctctcagcaggacagccggacccctgccccaggctctcagctggacagccagacccgccccaggctctcagctggcggtcaaggtctcctgctttactgataaacttgtctccagggacccacaccccctgcccaagggctcttgatcctgggcagacttagaagcagtgcagggcctcagtgtgggccctgagcctcgggctctaaagggtgaatggcacgttcacaccatcgtctttcctggaaacgacagcgcctgccattcaggacattacccagcccccggcctgatagcccatgactctccggttcataacacaaaatcacacttttcatcaagaagcttgtattctccagataattcaagaatccacacagcaaatccagcacagactgtttgcttcccaacacccagacacatgtgcctgcaaattcctgatgttacgaagacctgccccggagaggggaggcatcgccccagaaaacccgtccacagcatctgtcgaccaaaagaagaaccgccagagtccagggaagcagcttgccgggaacctgccaggtttgcatcgaattccccgagttccggaaaccccgtccgtcccaggcaaacaggcaccgtgggtcacccttccgggacccacattcgcgccaggcctaggtggaggccttggccctgggaaggaaggctgaccagaagcctcggcaccctgcccccgcggccacgtgtggacgcagaggcctcttgggcggtgaaaggctgctcctgaaggcgtttctggtttttccatttataaagcagagtgaggttataaatcagaaaagtgtttacaggagacacacagctggcaataacagctttgaggggccactgcgtctctgtgactatttcatcttccacgccaacttaaacatgagaaaaaaaggctttgcagcccagggccccgctgcacggcccagcagatcgagagcatttgcaataattcatagacttctcactttcatttttctgccgcccaggaattacattccactattaaaatgcgctgggactgcctggcccggccgctcctgcgtgttcagacacaggtcgggcgaggaccctgtgcggccccaagcggaccctgctgcggctccggggccgggcgcttgccccctgctggacacacggtgcactgcaggcagcccagagggccctccccgctctgcgggtgagaaaatcccgagacaggcgggtttcctctgagatggccacggttccaggtgagaaagcaggcgggagggaagaagctggcgtccaggcccctgtgcagtcacatctggtcctctgcggcccgttcctgttcttgggatgctggcgggggcactgccccagctcaggggcacagaagacccagatgggtgcaggcaggaaggccagcttggtcggggtggtggggggggcctgggccaaggccagagccgggacagcccccaggtgtggtcgggcctggaccttccctactgcagacccagtgggtcccactcgccttcagtcgaggctttgtcacctcagggcaagttgagggcagagctgggactccccagatactgcctgatctgctctcactgacccagccccagagccccaggcaggagggatgggcagggcctgagggacaggtctctgtggtcctcagagcctcacccattcacagtcaggcatggggccagagaaggccgtgcttcagtgggaccacccactgaaggccgaaggccggtgccagccgtccccacaacaggacccggaggcctctctgccccatcctccagatccagcctctagtgtgcacaagctgagaggggatgctgagggcaagaaggagcgggacttgggtgtcctgtcccacacgcccccgaggggctggcaggggaggatggggcaagatggtggagcttgtcaggggagatggggagcacatttcagcagctgtgctcttctgggacagcacaaactgtcggggagaagagtgatggccggcaatgcccctgggcagcgaggggtcccgagtccaggggctcaaatgcttcggggcacggtgacaatgccacctcctccaggaagtctccccagactgcactgcccagtggtgactctgagctgactgcacctcccctgaactcccgccctaggagcagccactctccggctgcatgactctctaagactcgggaggtttggggcgcagtcccagaggtttttcaggaaacagccactaaatggatgaatgaatgatgaaacctgctgctcaagggctgcagacctgggctctccctgcactgcccgggccctcagggctgcaccacccaggctgggtcgggccacacaccccaaaagggccctgccaaagccctcccaccccagaaacagaagaaggggccggcggccacccctgggcccagccccggcctccccttgtatgcccccagccccccaccaatgccctcccctgcccctggtgggtcagagatctcctggaggctacagggagcaaaggcgatgcccgcaggtggcgagcgtgttctcaggagcaggtgggcaggggccttgcagactcttcatttcttccttcccttatcaccgttagccattttcatgggatagagatacagaggagctcccattacaaagcgccattaaactgtcgtctgtgcaactgtgtgtgaagaggcatcggataacggtcagggctgtgcacgcctgagttgctggccctgcacccggcccagcactcctagagagaggcctcacctagagagacaggccttcttcggcacccagcaccactgcccaccccagcctgcccccctaaatgacactcactgcctgggcaggacagccccggggcccagcacaccaggagggctccgaacccggccaaaggtggtgggaagacagaggaaccgtgaagaacagatgatagtacaggctggggagagggggctggtgtccccagaggcagggccacccccccaacagttgagggggccacccactcacggcgccatggccagtgcagggcctggagtcaggccaagctcccgtctgccccagcttggcattcagaccaccaatccagcggccacaggagtgaggtgtagccccagcccctggcgctagagggaaactgaggctggggtaggggaccagaggtgaagcaggcctagaccccaccccgtctccagggggaaggagctgtccttggacccaccattccccctcagtgtgtctaagggccatggggatttaggagccccaggggcatggctggggtggacgctcaaggctgggaggagcttcttagggtccccagggtccactccacctggccatgcccagcccacaggtgctcaggccccaggccagggcagactcagtaaagagtccggtgggcaggtgggaggtgggaagggggtgtcacggcccagtgtctggcctttccagggatggggaccaggccttgacggaggctggatgtggtcaggtggggcctgggcagcagggcatgactccatggggggcacatgtggcacctggcaggaggtggagctgcatctgagcagagcacacaggagcctgtgtccctgcatgtgggttggtgcccatgaggccagcacgtgcctggagcagccaagcgggttccaggactcaagaggcagccaggctcagcgagcaagacaaggttgcctcctgaggacagaggaggcccagccaacccaacagatacccccagacagaaggtcccagactcacctaagaacccccagacagagggtcccagactcacctaagacacccccagacagagggtcccaagctcacctcagagacacccccagacagagggtcccagactcagctaagacacccccagacagagggtcccagactcacctgagaaatacccccagacagagggtcccagactcacctaagacacccccagacagagggtcccaaactcacctcagagacacccccagacagagggtcccaaactcacctcagagacacccccagacagagggtctcagccaacccaacagacacccccagacagaaggtcccagactcacctaagacacccccagacagagggtcccagactcacctaagacacccccagacagagggtcccaagctcacctcagagacacccccagacagagggtcccagactcagctaagacacccccagacagagggtcccagactcacctgagaaatacccccagacagagggtcccagcctcacctgagaaatacccccagacagagggtcccagactcacctaagaaatacccccagacagagggtcccaaactcacctaagacacccccagacagagggtcccagactcacctgagaaatacccccagacagagggtcccagactcacctaagacaccccaagacagagggtccccaactctcaggcaccccttcattcacccagctgtgactggtgggcctggagcccaggcccagggcaggtgcagtgaagaccccgcccagacccaggtccccacacacactggccacacccctgccctgggcatggcctgggccgagcggtggcagaggctgctgtccaggaggcttcgtctagcagctccagagagctgggcgctgagtgcggcctgctcaccccctctcctctctcctccctgagagtcagtgggaggtgaggggagagggcctgggagccagtggccagggtcaaagcccagctcagccaccgggcagccagggccagtccctgacgaatgagggccacctggcccggccactacaagggtgggggcaagggtggggtcagcaccctcgcgacgcccagaaaggccactaaggaagccgcagagcccaggccaccgagcacagcggggagaggaaactgcctggcccgaaggaagggagcgagcggtccaggggaggcaccgtccaggagccagcgcccggggcccctccgcaggatcaaaggctgtccaagggcacggatgcctccccactcccacccgggtgctcaccgacgcgcccgctcagaaatacaatatttgtagggtctttttcataaaggtctttatgggtttggaaatttaaacaccacggagcctgagttgaattggaaagcaaacgtctctaagcttgtacatcttagagcaaaaaaattcaattaagtgggattttagctgtttcaataaaattggactctccctcttcaagataagagctctgtggcgtagaagcacctttatgtgccacgagtatccacttctccgaaacgcgtaatcccggctcaggacacaatgcccacaacaggaaatcaatgcatagtcgaatcaatttgaaaatataaaataaactaatatatgagtggaaaattgacttcctatggattaaaagcagcacaaatagtagaaaaatctagctttttagcaaaaggaagcaggttggggggcggggtctgggaaggggcccgggaagccctcggtgcttggaggatggcactggggcctaatctagccgaggagaatacggggcacccggtccgaggctccagggctgccaggcggtactgagcctcgaggcccccgtcaccagcgcacataaatgctgctggcataaccattgagtggaagagttgataacgg

SEQ ID NO: 356 - DNA, 262 bp, Homo sapiens
gttcagacaaagcaataagatgacgaatcaagctctctccagagatgaaagaaaagccagtctcaaagatgactataactaacgctgttgctggaaagacaagggcaccgagccagccctgggagaggctccacttcttcaaagacaaaacgattccaaacgtggcaggacacagtgctcaccctacagtgaacctctgggaatatgttattttttaaagaaacaacagctttcagagattagtttccttctgtctgtccca

SEQ ID NO: 357 - DNA, 486 bp, Homo sapiens
ctttcgctcttgacgtctttctcccgcgtgactgtactcccgcatttccccggcgaccctgacctcactttcaccccagctaaggactgaaacgtccctgccgtaggctgcggccccagacaagctgggcgaggtccctgcatccaaccatcccgattcctgatgctgggttacctaagcctaaagcattttcagtttccatctgtgcctttcaggaacctcctgatttctgattgcgagttggacagtgtggtccccggaccagcagcattgacatcacctgggagctggtgaggaatccagactcttaggccctgccgggacctgctgaatcggaacctgcaatttaccaagacctgtacacacattacatgtgagaagcccccccagagctgttccacacttgctccactcctctccccaacattcagacccacctctggctctctcatttccagcagacacccttcctcttacccagtggag

SEQ ID NO: 358 - DNA, 407 bp, Homo sapiens
aatcaacggtttctgggtctgagatgttgcatacaccttctcagtccctgtatcctgagatggagtcacctgagaatccacagcaagtcctaaccagggatgggtctgggtgattaaggaaggttggcttcagaactgggccaggggcactgctttgcttttgctgttttgatcagctctctgcctgaaggagacaagaaaaaccaacgggaacagcccagtaaaggcgccattccccattttacagctggggaaactgagttacagagcttgtctgcactgagtcatcaggagcaaatgctagatcagaccaacaggtattctaccatataagaaatatgatgttctctgtacattgaagagttggtctaatatttggcctggtggatggagaaattgcctgtctg

SEQ ID NO: 359 - DNA, 298 bp, Homo sapiens
gttagggcgagggtccctgggatcgtcaggtcaggccttgggctaacgtaggcactctcgcagttcctccgccttcaggaaagtctttttagcaggggccttacgggttcgcgctttggtcctggaggccttatcctagcctcctctgtatcagcgccaccagtctggggcccgaaaggagggagctttccctctgtcccccagcctttggactgtcaccaaacaagccattcgttcaccaaatacttattaagcgcctaccatgtgcctgacaagggagatgtaacgctgttgttcc

SEQ ID NO: 360 - DNA, 239 bp, Homo sapiens
aagagaagaaaataagtgcaacatgccagaaatccagtaaagcagttcaagtatcagaagagcgtgaatcaaaaccaagtgcaagaagaggcaccttgacattgaactgaaggccaccaggtactcactgggtcaatgactcttctcatttttattctcctgccagtgcttccaatcgctgaactgaactgggaacaaatcaacaagggaaaccaagagatgcattccttgaagttcag

SEQ ID NO: 361 - DNA, 2513 bp, Homo sapiens
ccagcacttcaggaaccacgttgcaggtgtcacaccttggattcaccatagccagcagaaaccagtggcaacagagactcccgatgataaccagtggattaaccaacaagacccagatcgccccacctgaatagtcctacggcgaaacccaaccaccggtaagaaggacaactggcctgctctgaccacaccggaggatggtcagtctatgcacggctgaagcttgaggatcctgcaagctctgctctagtcacatcctggaagctgactagtctacgcacagtcgaagctaagaggaccatatccggataagtaaatgtggatacaatttataagcctacttacaattctgtcaacactgattgctctgctgttatgttatcattgcaaatgctgcaaatgtctatgcccagaggaaggtttgccatgcccatgtatagtataggcatgtttctattacatacactgttgtcgttaccatttctgcctatactagaaggggagaaatctctagaaggatgtccacactgtgtacatactatctgggtaaggaatagcgtagttaaaactctactgtaccatacctactataaatgtacaggaaccaagttagaaacctacacatacaaccagaaacagtctgcaatggtttaacacaagagaggcttagcaagagcagccctaaacacctgtacggagagctacaaatcggatgcccagactgtaacattcggtggtctacactaacacatctccaacacttatattcaggaaggattgctctgctaagtagtatgtcaaccaaaccaaattgtaaggcaagaacatgcaatcctttaaattttactatcttaaagccagagctacctttttggtctacaggacagacagcactattatgagttgatagacaaggagtaggccttggagttccactactaattgtcaaaaagactagaaggattcaaatgtgtccaaccccacaattccgggtccataagtcattctataaacattttgatcagtcagtgcctgagctttcccatcaaccaaaaatttacttgctcaactagctaaaaacatatctggcagcttggaaatttccttatgctatgtatgcggagaaactaatataggggaccagtggccatgagaggcaaaaaaagtaatgccacaagataactttacttcgcctaaccctgccagtgaaccaacagcctcaaccagtgtttggttgtttaaaacctccgtaattgaaaagtactgtatcgcctgagtaaaaaaaaaaaaaaaagctttcacagaggcagtaggagaaacaacctgcctagggcaacagtattatgatgagactaaaaacaaaactctatgcagaaacgcccagaacgactcctatttaccagatccaaaccctttctctcggttctctactctaagccactcttggcatcagctagaggctccagatgcttagaaagcaccctttggcctatattggaactgtggagcacgggtgtgtcggcacaggcatatcagctaaatagacagaggcgtgtgtgttaggaacaatcaagccatccttctttctaattcctctaaagcaaggggaactcttaggatatccagtttataatgaaaatttaaaaaaaaactaaaaaaagcataatcgcaaaaatgacacaaatgtcaaaaaaatgtagacataaaagactggaaagataataacggccgagctgtcatagaaatcacagctaaaatgcgcaagttagcccatgttccagttcagacttgctccagataatccccggattccttgtttagaggatggttctcaacctttaaaagattcaaaaccctcattggtgggtttttgtttattcttggaatctgcctcatcctcccttgacttttacccctgtaagtaggagtatttgtcaactatagaggcagtggtaacccgacacactgccacgcagttgatggcattaaccaaatatcagccgctgccagtagaagaaagagctcagctctgtgaagaggtggcaaatagtggtgctttctattaacacctttgttatgaaaagcaccaaaggggggaaatggaacagaaattaaaagaaattaaagaatgtgtgagcaaaaactcagttatatgtttaaaaaaaaaaaaacaccaattccccctgaagaagagaaagagctggagtcctttaaaatcaactgcctgtttttctgtggctagtgagccttctctctccctttcccaggcattgtgaagactgtttctctagctgtgcagctgtaaggtcactagacagataatctcaagtcataaaacatgttgttccttaaaaagtaaaaagtaatataatgcatgtctcagttaaataactgtctttgcttcttgtttctataataggcttccccctgcacagatctcccctcgccccacaaaatgcttaaaaggtagcttaactctgttcaaggctgtgtcctttaaatgttaatctgac

SEQ ID NO: 362 - DNA, 3305 bp, Homo sapiens
gaatgttcatagcagctttattcataatagccaaaactggaaacagcccaaatgcatagtaacagaatgagtaatttatacaattcaatactgtatacaacagtatgaatgaacgaactacaacatgcaacaatacagatgagttgtatagacatactgttgagtcaaagaagccagacacaagagtgcatattatttcatttatttgaagttgaaaaacaggcaaaataaatctatgctgttgaattaatagaccatccttgggatagtggtatagtaactggaagagaacatgcatggggcttctggagtactggtgatgttccaactcttaatttcatactagtttttgcatgtattcacggtgtgaaaaatcacacctgtacacaatttgtgtgattttctgtatgtaaattatacttcaataaaaaatttaccaaaaagcaaacaaacagcaagtgagatatcactacacacgtattaaaaagcctaaaattaaaagagaaatcaatcaataccaagtgttttaactttaaaaattaaggaatgtaggtgttaagtggtacaagagattcccactaagaaaaaagtgggctttgtaagggaaactgaacttaaaggtattgaaaaacagatgaacagccgggcacagtggctcacgcctgtaatcccagcactttggaaggccaaggcgggcggatcacaaggtcacgagttcatgaccagcctgaccaacatggtgaaacaccgtctctactaaaaataacaacaacaaaaaagccgggcgaggtagcaggcgcctgtaatcccagctactcaggaggctgaggcagaattacttgaacctgggaggcggaggttgcagtaagccaagaccatgccactggactccagcctgggcaacagagcaagactcaaaaaaaaatggacacacccaactttttggataatgcccctctctcatccttggcatgagattactgattacgaattactgagggatttgttggagactgacactaggagaggaatgtgaactattacagtgaaagctggactagtaaaacttacccataagaatgcacccatttgagacaggcacaagacattacaacgctcctctaggtgtgtgttgaatagttagttcttcagctttgctttgcatttctgctgtttgcaagactgcctcacagagggtcaatccttccctttttcctctcccttttctatttattcattcaacatatatttgtctagacactgtgctaaccactaggaatatattaatcacaagtaatagatgtggtccctgctcttgagtttcattctaattttttaaaaaacccacattaataatcacacgtatcaatgagtatgactgtagtgctacgaagaagagattcctggttttgacagcctatcggcctggttaagaaagaaagggtaggctttctggaggaagtgacacaagttgaaatcgaaggatgaagagaagttaactagggaaccaaataggtggggagcatgactagtaagaggaacaaagtccaatgtggttggaacagagaaaataaggggacatatagcagaggctggacagatcagcaagggtcaggctatctctggccttgtggactgtgttaaaaagttttgtcattatcctaagggcaagtaatgccagaaatggttttaagttgagaagtgccctgattatatgtgtgttttgaaaaaaacccaatatggctgttgtatgaacaagtgattggaaagagataaaagtggatgaagggtagacaggaggatactgcagtaagccaggagcaaggtgatggaagcttggattggcatggtagctgtcaagatggagagaagtaaaactattcaaaagatatttagaaggcacatgggcactaacagtagctataaaatatgttccatctttatttctaaacagaacaaatagactaatgcatttacatccgattcaggagtatgcacgttcttaaccttggctattagtcttgagtagcacatttcttcctagggaaaaagttatgtgaccagattgtaccttaattgtgggtgggatattcagaagctgctaagtatgaatgtgctcaagaagagaactgagaattgccttcaagttgcaaaagagagggggacaaggctatggaaccaccaatgaagtattaacacccaaaaggcatttaaagaaagagaaaatagacaagtgtacaaacagaagggcaagcaagaggctgctatctgtgtgggacaagtttaaataggactattcagataaaccaaagctaggacaatgcttctcaagacctacagagatttctggaaaatgagccatcaagacatttgaatgaagactacagactcctcaggaagtgagaagctcttgaggaaagatgtccttacacattcaggtgagtgcttaaaacaaagcagcatatacttcactgaggagtactgccatatttctgatccccatgctgggggagttggtgagggaacagtagggccattatgttgcaggggcaattgtattcccaggtgagaggggataaaagagcaaacactaaggctgtctccagaggtgcttggctaacagtgagaagataaagctgctttgatttcccctggggaactagattctaccaagggctactcctgctgctcaaggcaaagagctgggtcaccactcaaaggaaaaatactgagggtcagtccaggatggggacaatggcagggcagatcacagcatttccagcacgtatgaaaacaactgtttaggctgctttcatactgctgtataaaacccccccaagactgggtaatttataaaggatcttgtttgacagttctgcgtggctggggaggcctcaggaaacttaaaatcatggcagaaagtgaagcaggcacgttttacgtggcagcaggcgagacagggtttgtgtaggacgcaaagggggaagagcccctcataaagccatcagatctcatgagaactctcacaagaacagcatgggggaaactgcccccatgatccagtcacctcccaccgagtccctccctcaacctggggacggggattatgaggattacaattacagatgagatttgggtggagaaacagccaaaccataccaacaattttgtcaaccagaccccagtggcacctgggaccttgggactgaccaagctggtgctacagaagcttttatggagagtggatataaagttctgggggaaagctaagtttggggggatgagtaaactaaagtaacgagaat

SEQ ID NO: 363 - DNA, 694 bp, Homo sapiens
accccagaacctttgctgtcttgggacggatcaccgctgcaagaggggaagttgctactgtgatgaattctgccatgtggcaccagactgccacccagaccacagtgtcctctgcaaccctggtaactcacatacaggcccgattccacctacagcaaagctggatgcgatggctggcagaggcaaaccctttgcctgcacttcaggccaaagccgggatgtggcctagatggttcctaaggtccctgacaatcctgagatcttgcatcttgtctatttcaggtcaaagcttctcagatgaccaagatggtgctgcagatggtgctgaggatggagaacccaccaagccccgctaggagccacctagactggatgcagagcatggttcagtgagttctccaaaccagcctcccaggaatgccattcaacatggctgtgaggagaataaagaagagagcctgactcctctcctgaggccccttccccaccctgagccagcaggatccacggagcagaggtcatctgtccccagcttggcccactgaggccagcatggctgggcccaggatgcttgtctctcagctcccatcctgtgtacttccacattggtttaaccagaggaaaaccgaaatctacaattgtcataaacacatttaaatgtgcgtagaatcagccatacaaattgtgaaacata

SEQ ID NO: 364 - DNA, 8459 bp, Homo sapiens; identical to SEQ ID NO: 31

SEQ ID NO: 365 - DNA, 376 bp, Homo sapiens
gaacccagagatgcagatgccccactcactccgatagagaatcaaccccatcccacataaaatagaacccagagatgcagatgcaccactcactcagatagagaatcaaccccacataaactagaacccagagatgcagatgccccattcactcagataatcaaccccacatacaacaggacccagagatgcagatgctccactcactcagatagagaatcaactccacatacaacaggacccagagatgcaaacaccccactcactcagacagagaatcaaccccacataaactagaacccagagatgcagatgccccactcactcagagaatcaaccccacatacaacagaacccagagatgcagatgccccac

SEQ ID NO: 366 - DNA, 204 bp, Homo sapiens; identical to SEQ ID NO: 42

SEQ ID NO: 367 - DNA, 1782 bp, Homo sapiens
gttaatattagactaacacctgccccgtggtacatttgattgaactgtgttgtgggggagataactgtcctccctaagttccctgaggacacagccatgtccttcttgttcagttcctggtgggtgctgggtgacagctcatgggatgagtgccgtgaaggctgtggttgatgggctgatgaaggggtggccgtgccgggacccacctgtcctcccctccttctccctgtgccatgcagatgtggtcaacgggctgatgggcacggctgtgggaccccatcattcccctgccccgcatgactctgctctcccagctcgactgctcacttcagacttcccttatggaaggagttgccagatagagcaagtaaaatacagtgtgccagacacaggtttatttcaacactgggaaggctccattcctacttaaacccagcagggaacagggagcggtgtgcagaggaggtggcctgcccgggaagccggccttggtgctgggactgcagggagagggctgtgaggaagagcacaggcttcatgcacattgcacagaggaggagattcatggggacagcaggcactggttaggcacagcgggaaggttatcgaagacaaaacacatttctacccaagtttaaatgacctgctatgcccacagagcttgatccagaagtgcacaggtaagtatttagcaggctggccgatgttgatttgaacaatctcaagaatgtgctctttagtgcattaaacatatgtgacgagagctgagcacgtttaaaatctcagtaactttggggtttgtaagtgttgtagctcatagtgtcggttaaggttagacatctcagtcacatgctgtcttggcaccagctgtggactgtgctgtgaaagagatctgtgaccttgcaccctgagatctcaggctcaattaagagacaaaacaggcaatgcagtatcagtgcagatgggaaagagaaagcagaaagtatgaagagggaaaggaggagcacaaaggagttagcattagtctctactgagcaattcctattccaaccacgtcctaaatgatgagttggatcctagcagaaagggaacacatgttatttttaactgattttaacttgatttattgtaacctatcaggagctcttaataaatatggctctttatgttgttagcaagtgtgtttgatttttgccactctaggaggtgagctctgtccatgttttcagagtagaaagtgatctatgatacaatgaactgtttttagcttcatgagttagaagtaggaagaggagaatgtatcaatttgttaactgccttttcctgttcaaaaaaaagctttttcagcaaaacatagtccttaagtttaaaaagtcagtgtttattatctgacagatatgtttaaattagtaaagaaaacattacattttcataaacattgaatgaacattatgtgaacattgagtttaacttttggttgtctcttgggaaatttttgtcaatttgaaaaatgatgaaaagcatcaataaaagatgcaagcaattgtgtaatctcaatgtgctaccgaagtggctctctgcttgggtatgagaaaagctatcaaaggaaaatttgatttaagaaaggaaatctaggccaggagcagtggttcaggcctataattccagcatttggagaggttgtagtgggaggattactttaagccataagtttgagaccagcctaggcaacatagtaagacctcatctctataaaaataaaatggaaagaaagaaatggaa

SEQ ID NO: 368 - DNA, 700 bp, Homo sapiens
cattgttcactttcttgagtgtgataaagatccagcaaggagcctcccagatggagtacatggagaccatgactgtgaaagatgaggatcaagtgcagatttggtggcctctgattgccagtatctggcagccacattctcttcccacaagatgtgctggaaatatgaccaagcagaagttcacttaagtgaatccaacagttaaacctaccatggaagggtgtggtgcacagagggcatgtggagaagagaagaccacagtgggaacctccaaggaactaacatctagctggggatgaggggggatttggctatgtagagagtaaataaagtgatatgagaattaaagtaaggggccagttatttccaaatggggaaatggggcaggcttcatggagaagggaacgtttaatctgggtcacatggaatgaataggactggaaatggagtttataagagcgagaatattttacttagaggaaactacatttaaagaaaggatggctgtgtaggtgtattgcttctttgcagatacatacaatttaatatgcctggagtgcagattctatgtgactgaggtgagtagggacaaagggagagatgattcagagaggcagatagaggaaaatcatgcagggcttaatttctaggataaaagttggtgactttttcatgggtgtgtgtgtcagggaagagggta

SEQ ID NO: 369 - DNA, 407 bp, Homo sapiens
caaaaatgaacattttatgtgcacaaagatagtatcataagaggtgtggcgttttgccattggaacctgggcatacggtcatttgtcctgcagtttctcgtgtactgaaaggtggcgtggatcctacagtttctcgtgtactgaaaagcggtgtggatcctacagcttctctactgaaaggtggcgtggatcctacagcttctcgtgtacggaaaggcggcgtggatcctacagcttctcgtgtacggaaaggcggtgtggatcctacagcttctctactgaaaggtggcgtggatcctacagcttctcgtgtacggaaaggcggcgtggatcctacagcttctcgtgtacggaaaggcggcgtggagcagcacaaggagcttgagcgttgcaatgagaagtcatgg

SEQ ID NO: 370 - DNA, 8793 bp, Homo sapiens
ccccaagcagcctcttgccatcatctgactgaatatttttccactccgagctctgggtactgttggaatatgaaatagattattcattactctcctctttgccactgatttggtttcatgtagcgtcttccacagagaaagatgaaaacttgtcaaaaataggttatatcttattcgaaggggcaacaatagcagcaggtacaggcacactttaatatttaattaaggttgatgttaacccctttaaatgactttagctgtaagttgtattcaaatgcagaagagaaaaataattgttcttaatttgcaacctgttcagcaggcgttcttcatggagtgagctggaaatttagggcagaatttttaaataatgaaatttcccatcgtaaatattaatagcagtttgtctacgtagtggagaattaactaggagtgatgatttcctcatccctttggtttgaactgctagcctagtgaggcactccatgcttgggagtggaggtggctttcctgggagaaacgtgtgtgtggaggggaagttcagagccaagttctgttggttggttgtggtcagcgctggtttcagaggaaccaccgtgagtccctggtctccaagccacttgccttcccctttggctgggtgtgttgttgcagggatgtgggcaggcgggagagccagtagagacatcttaaaggaagatgtgtgtctggttggctggtttggggagggtctgattgggggtatgtcttgggcatctccgtgccgtcaactggagctcattacaaacagcgcttccctaatatgcaacagggagacactttgctgagatgggccttctgtcctttttcctttctgtgacttgctattggtgaatggctcttcttttccatggaccatgagcttgaagggccagggaggacaaagccccatcgtcctcatcctaaatcggaagtcagtggccttctccatgctatggctgctgtctatgtctgctcagcctgtttgtttgatgagtttatataaccatggaagccaccctcagaggcccggttcattgacacttcagggcaggggtgttgggtcaatatcagggaatgggaagttcctttctcccatccccagagggaccaggccccttatgtagctccaccatgggtgtgaggggaagagatggtgcacgttccttgctcagtgtagcatctctcagcatcacccatccaaggacagatggtcctgcaggagccacggcgtgggaggtacctgcctggcaggcacgagccaggtgggacctggcctcaagcctctttggttactatgggcgtaggaacagcagacatgccaggctttggaggatctcaagcctccatttcaatccaggataaattagccacatgacaatctgtcccccttgggatggccttcacacctcaacagaaaaggtaccaagagccatttttccaaaaggaagaaaggaaggaagaaaggaaggaaggctggctctgtgaagagccatcctcagtccaactcccagtgaccctggttgagggtctgcctgagactagctcaaactcaacctcaccctatgcagtaactctctaactctaaactagcccccaagagatattctggtggcttcactttgcctgtgacccatcagactcagaccagtggcacctgccagaggctggccacataatgtcagcagtcaggtggctctcagcccagatgccagtctttgttaaacagggcaggtgactgcgtggacagctcagaaaagctcctgaagccacaaatattgcacccaagatggatgagagcagccaggcccaggcagcaagagtctgtcactggagccaggacttcctgaaatgagtgactgagccagggttagtgtcctgttgtggaggagggcagatgcggggagtgcagagtgagttcccatctctattgggattccagcgcagtaacaaggagccagcttaccagaggcgagcagggcaaaagcaagatggcaggatggggcacgatatgttgggggttgggtagcagagggtggacaggtgagggatggagggtttttctagcaccaggggatagcaagggcaagtaggcccccttgagctcatcactgcccttcttcaggaggagctaaagagggggaaagacagggtgcatctctccagggccccctgccccagtcaaacacccctgtggccatagctcctgggctcccagtgtgccatggggaaagcacttcctcatccggaatcgctcgttactcgtgctacatgaagaactcagacatcacagagggggcagtcgccaggaagcagagctctggactgtgattccatgaactcgcgcaccccctccttcccttcatccaaacaaggccctttggcgtgaataatagctcagcggctccgaagccgtattgatcggctgcaaacccggctccgccgagagctgccagggcttttcctgggggcaggaccagcaccgctcagcacagcctcctctccccctcccacttccccggcctcccccaggtgtgttcaggaggggacaatacctgggggagcccaggccctctccagctcagtgccacttcgttaccgcaactttgctgtttttcacttattttgccagggtaagcacctaagttagagagaaatgttttttcgtgacgaggccccacagagttgagaatgaacacatcctcccgctccagtttctccccagaatgttctgccaaggacccaggccatagaggcatcctgggctgacacctgtgggggccctattatacccccagcgctgacaagcacttcggcatcctgtaccacattttcgcgttactctcccctgtctcatcccatcagaaaagaggagccaagaacatggctaggactcaccacctccttgagggatggggactgttgcaaaattcaacagacgtgcatcagccgcaggctgggagaccagcagagaccaaagcctgccagccccactccctgagcctctgaccagactgtccctccccgtgtttgcacctcttctggacacaggaagtggtcaaggccttgaccctttgagggatgccaggcccctgcgcagtgacaccctcgcggtggtggatgcctgaaaccccacccctagagaggccgtcctgtggtttctgccctggaacactggaaaaatgcagattcatttttccctagacagcttcagtcctaccagccacagatccctctaagtgagttgtctgaccctttcctgggggcagattttgggtttgggggaagacagacccactacatgagggagcctgagtggtctttgggagaaaggttagaaggaaagaggggcttggttccctaggaccagctccctggaggttgccccgtatcagctgccttcagccttgccttaaaacccactccctggccaggaccccgttcttctaaggattgcgttctggcttagggctgcatgcaggcaaacatgggagcctgagaatgggctctgcaaaggagcagtaatgggttgagggtctcctgacaggtcccacagccatgccctggctgagaaggatcgagaaagagcagggaggctgggttggagtttggacagctaaccctgggggcaggaaaattgtgtccctcctctggccctcctgaggctgaaggaagtccaaatccgctgtggtgtacaatttggcatttggggaaggacccaaaagggattcttttctgccctgagcagaccttccccacactgccacatccaggggtcttggcacagaggggacactgtggccgtcagagactctccgctcaatttccatcttctctcattcatccacacccacccttccagagctctacactgcatttctaaagaaagggagaaactcgagtgagaactagagggcttcactgagctcattattatccccgacaagacttctaaataatctagcctttccctgtttgaagcatgagaggtgtaagcagatttattcattcattcattcaatcaatatttattgagcatctactatgttccaggccccgaagacacatggtgaagaagatagataagaaaagaaagaaggtagtctcacagcactggaagtcagaaaactattttcctttccagaatcctgactcactccaatcccgggcaaggtcattctcagggtctcaaaatcacattgcgatgcctgtgcctctgccaccttctacactgccccctgagatgaatgcaccatcactgtgaattactaggcaaaatcttctccaagtggacaatgctgtatgttcattcctccttgcaatccccatgactgcattagcaaaggagccccgctgaggctgagtagggctgacacttgcctgcaggtgggcaggtccccatcagcactggccctacttccaggactggcctaggagaggccagggataggaatggggactgtttagatcggggccgacttggaggattttttcctcctgcttattaaatgttaaaggtttgacttggcaggcaatcaggagcccaaaatatcataaaagggaaaaaagttgccgagtggctaagaggtgcaccacgggagtgtcactgggcccgccggcgaggtgaattgctaagcagagagcagtgaacggggaggaaatggagcagcagacattttcaaaggcttctctccccttcttctcctctctctgtcccccatgcggaaaggggaaaatagaagtagaatccagattggggcgcgtggctgatttggtcctcctcccgcaccatcctcccccagacagcagagaaactttgatgtctgggtgcatggcattcagggacagaggagcctgggcatcccagcaaatgcagccgcatgttccgcctctggacggcctctctgaactcctttgtgaggggagatgaagcccacagagctggaaagagcagcgttttgaaatgaggaagtgtggatcggcattccttgagctcagtgctagccaccttggcgatggggtgagccaaccaggagctcagatttataaaacttttgagctttgtgggccctagggggccactgtggcctacctgctgattttcagatggggaaatgggggctcagagaggggacaagatttgcttaatggcacctagcaaattggtaacaggtccaggagtagattccatgccttcagcctctggtgagacgtctttcctctgcaccaggaagtggaacttcaaacagcaccaggggttggaacttttgtttcaaatcctctctgcctcatccccacccactgcccagcaactcaaggctgggtctttcgccccctcaggctcagaagggctgtggcccagccacagagccagggggcctcctcagtagtattggccttcacactcttggtgctaaagttctccagttacttttttattaaaccaacatgtacagaaaaactcagttttcggctgggcacagtggctcacacctgtaatcccagcactttgggaggccgaggcaggcagatcacttgaggtcaggagttcgagaccagcctggccaacatggtgaaaccctgtctctacaaaaatacaaaaattagctgggcgtggaggcgcgtgcctgtagtccctgctagtcaagagggtgaggcaggagaatcgcttgaacctgggaagccgaagtagcagtgagccgagatcgcgccactgcactccagcctgggtgatagagctggagggaaaccctgataccacttctgggtccagatggctgtggctggaatgcggccacagccaggaacagcgtggtacggataccagtggggctctggtcttttcccagaggctggcacctttcatgccgagttgggcctcgggtctcggggctctaggccctgctgtgccagtggcctgatgtgtggccttatatgccagtcacaccctgctccagacctcggtttcctcatccacaaaatgggaaagctgggctagaaaatctctcaggaaggtaggtctctgctagctcccagccttccatggcagtgcaaagggaaccttcccaacaaagtaagagccaaaggctaagatggcagtctgtggtttgtagaaccttctagaagaccacgagacttggtaagctgagcttctaagtggtccaggatgcagggctggtgtcacaggtgtgtgaccagtagagctacacagggctttgtgcccagaagggccccacgcttgggaaataaggctctgcagtcactgtcttcaaattcttaataattttatctttgtcactgtgttttgtaagtgaagtccaatgggacagtggaatgtgaactgggagcatggagcctcccatctccctgcgtccaggatctgcttctcagctgcttgctcctctgcccccacagctccagctccagctccactcaccttctacctccctgcctcccacccagcaaccactgccaacctgcccccaacctgggcacaggcacaccctgtgggggagggggacaagcacaccccacagcatctcagagtggggcatggtggcagcagtccccatcctgcactggcagcccagggcacatttcatgtgggactctgcgggggtgagcctctagccccccccagatccagtacctcgtgtgtcctggtacaaaatttgtagtgccccgggggctgcccatctgctatgggttggggcaggggcctgtgggaggatgcctggctcaacctcctgccctaggcctggagcacaacatgtgggcccagcagctcacaggaaagggagccagaagatgggttcaagtgtttgtgtgttccccaagtcaccagggtgcctgtgggggtctgcactcccccaggagaaccctcatgtctagggagcactccatggggtcatctccatgcctgagaggaccctctcttccttctttcaaccttccggagcccagcttgtctcttccggccaggtcaaggtatcctcctgagagaaccgtgaaatacagtgtgccgctttgataattccacatgcatgttcaatattcggatatttccagttaaaactggcattgcacaatataaaaaggaatggtaaaagtcatgctaataatttaaaattttgactttacttagaatggtattaactagcaaatttaaaacaccatgacaaattgaaagtgagactggggaagaaagcaaaaagcatgttttctgactgtttgaacaaggggccccacattttcgttttgtagtgggtcctgaaaattatgtagccagtcctgcctggtgagccacctaccctcttgggcatttagttgtctatcagtaaactagatcattaacactgcgcctgcccctcctgctcacgggcacgttaggaacatgcgcttggataaaatccaagccagagatttagaaaccagtgtgtggtgccagctctcagccttggaaccacaagcccatttttcttaaaaagggatctggactggcatccaaagagatttcagtcccctcatataggtttaaccaccatgggcaaggcagtctctctcccaggtattcctctcactaggtgctctgctctagaaatgaagtctaaaagcagccccatcaatacagaacagagttagaaccacccggagagatttaatctggaatcccagcaagttgtgaaatggaaagactagtcggccagagagctgaggtctcacagtgtgcaaagaccagtcctcagtatctgcacccatccatttgagtttcaggtgaagcctaggatttgggagctcaatacaaagatgccagcatgaaggagggtgggtgccaactaggtttggatttagagacatcctccttttgggaaaggaaaatatcctgattccacttaggtttccaggaagaaggcatccccatttcagaacagttttctaagccaccctcatggaggtttcacctgcagctttcagtctgctttgtctgatgtttgaggatgcaactgcccaaaaatgggtctaaagtagcatcccgtcacgttctgtaaaaagtaatactgctttaaggtaacacttatggaatgaatgaatgcatgaatgaatgagtcagtttggatgaagttgcctcaaatagagtctaaatataagatttcatactcgatagtgtcatttcaggatcaggaaaaattaggtgactcccatttggtttctacagcttttccccaatatcatgttaaagttttggcttttatcttatttcacttatttcattttgagtcatgtcttctggctccagctcagcttcctagagataattcattaggcccgagagctgctccagagtgggattagaacccgtgtagtacatagtcacattaaactgagatcggctaattaatcgctcttctccgtgtaactgagcgatcgcgctccttccccgaggaattgcaatttcatggttcctaatgatggtgcgattacattatgtggatcacttaggctgtgggtgtcaggagcggtacttggagcctctctcggtggggatgggagaagtcacttctaaaaccggggagatggaggaaagcagttagaatgtctgttactaatttttgttaacgtgctgctgtttcctacatctcattcaggcattagtttcaagttccattttcccccagcaccgtgtggcaccttccccagaaccctcacattttttttctaatattcacagggttattgtttgtaaaaaatctatttatttgctttattccattttcc

SEQ ID NO: 371 - DNA, 843 bp, Homo sapiens
agctccgtacccctatatccacgactcagctccatatccctatatccacaactcagctccgtacccctatattcacatgactcagctccgtacccctatatccacatgactcagctatgtacccctatatccacatgactgagctctgtacccctataatccacgactgtccgtacccctatatccacatgactcagcgccgtacccctatatccacatgactcagcgccgtacccctatatccacatgactcagctctgtacccctataatccacatgactcagcgccgtacccctatatccacgactcagctccgtacccctatatccacgacccagctccgtacccctataatccacatgactcagctccgtacccctgtatccacatgactcagcgccgtacccctgtatccacgactcggctccataccccgatatccacgactcggctctgtgcccctatatccacaactcagcgctgtacccctacattcacgcaactcagctccgtacccctataatccactttactcagtgccgtacccctataatccacattactcagcgctgtacccctatatctacatgactcagagccttaccccatatccatgtgactcagctcctcacccctatatccacgtgactcagcaccatgcccctataatccactttactcagcgctgtacccctatatccaccgcacctagcgtgtgggaagttcgtgcagagttgtttctttttttgagacagggtcttactctgttgcccaggctggagtgcagtggcgtgatcatagctcactgcagccttgacctcccgggctcaaaaagattctgc

SEQ ID NO: 372 - DNA, 408 bp, Homo sapiens
ggaagcagagctaggggagccgaggagctcctgctgggctctgccagggaagaagccgcagtaggagcccctacgtaggccctgcaagaggcctggcgttcaggaaagggcccgctgaccatccagtgcagggaaaggagtccagctctggcctctgcccctcagctccacctcctgcattcctaggagttctccagaggatctgatgggagctcagaaccggtcccaacagctccctccacccttcatgaacgggggctggaaaatgtggtctgctctgataaggatttgcgtcaggctactggctactcagcagccgagaagagcaagcctccaggcctctgcacgcgtgccttctgcccgcctgcctggccctcggaggctgcccagtgcatcatagtacatccc

SEQ ID NO: 373 - DNA, 533 bp, Homo sapiens
cgggaatcacgagagcagaagatcgagaccatcctggctaacacgatgaaaccccatctctaataaaaatacaaaaaattaactgggcatcctggcagacgcctgtagtcccagctactcgggaggctgtggcaggagaatggcgtgaacccggggaggcagagcttgcggtgagcagagatcacacaactgcactccagcctgggcaacagagcgagactccatctcaaaaaaaaaaaaaaaagacttggctcctcacttgtattgtgggaatcccagcctaaattggacatgtggatgttgagcaatagaggacagacaaacaaaggaatctccagaccctgcaggacccaaggcagcagcccacgagtggatcctaaaggattttcatcagctgcaagtctggggttactagagcctgaccaaaattctctactgaccagagacagacagacagacctgttccctgttccccaacttccagtggtgctgcgcatggagacgctgagatccacagagtcatcccaccaaaa

SEQ ID NO: 374 - DNA, 383 bp, Homo sapiens
acccgatggtgcacccgaaagaacacagagggtggagggggagatccaggaagtggtcgcggagcagaaccccctttcacttcagtcaaaaatctctcacactttggatacgctcctctaatcctgtctgaaagagctaagctgacccccaccaccgttggaggaaactcctggagcagtgctggggttttcactgcaatcagctgctccaactttgtcttgtacatggctctttgaccttgggcttgtggattaggggcctgtggaggagctctgtgactgctctgatatctgtggatggttctgaggcattgtatttagtgaaaaaactggaaaccatatgcatgtccatgaataaaaaatggggcataggccgggcgccg

SEQ ID NO: 375 - DNA, 1593 bp, Homo sapiens
catcactgcactccagcctgggcgatagagtgaaactccgtctcaaagaaaaaaaaaaaaaaaaaagaactgaggtcactggaagctgaagggatgggtgattcacataaagcccttcagtgtctgagttgtattctgccatatcctagctccacccttcagtgtgactttttaagttagagaacttcccacttacagtgtcaaatgagaacaggacttgccttctctcttcaggaatgtaggtactggggattgactgggtatttgtctgcctagggttacacagggagatatccaggttggaaagagtaaaactacaattcccagactcccttgcagccaggttcaggatgtgattttaggtcccgccaaccagatatacttgtgggagactgtgctgtagtagatcatgccagaggtggacccagcagctatacagctgtaacagcagctctctggctttgcagcttcctatacttgctcaagaagctggaagtcttgtttgtgaggttggagaaacaatggcaacactggtagcaccgtaagcaaccatctgccactttgtgtttgcccacctacctatggtgcctgagcactgctgccatgtacagactacacagaggtggttttttgcaagataattgaagataggagaggacatgacagcgtttctcagaaagaatgctgcgggggaattttcaaagcaagaatcccttcctaagaattaattgggatgaatatgtgcatgttagacagttgaggctataaaataaggacatgtcagaagtagcagttctatgtccttcccttagaatttcatgaggtgtagggtacccttccccaccccagggcgcatcactgaagtgtagtggtggcagccatggcctgagggcaggtcagcacagaaaaacaccaactccacagagagagtctggcgggagcaggtgcatgggcatctggtgacctgagttcctccaacagaacaagccatggggcctctttgtgcctctgtttattctttccccaagtggggtcacttcagacatttggagatatgaggcaacaaggagatgggaaagttcaccaacaatgtaaacactctacatgagagagttttgttgccaatgtgctagaagaggcatgcttcagggaagaggtgagaatcctatacatgggaaggaaggaaagaatcaagccctgtaaaagtacaaaggaaaaagagactagaagagatgtggagttgggggatcctgccaaggatctgagtgcagcaatgtttacagtgttgaatacttgaaaggtgcccaggggcctggagatgacctgtggggaacctgcagccctagcctactgtggccactgcctcctaggtaaatgcatatcccaaagtccctgcctgccttcccagccatcatgatctggtgctgacaaggggctgtggacactcaaggggcactcactggggtgggtttgggtatattgcggcatgacagtctggttacgatgcagaccacctgagaactccaaggctgacagcagatcctccagtgtgttgaacgcctgactctaatggcaaatgtttctcttcatttg

SEQ ID NO: 376 - DNA, 835 bp, Homo sapiens; identical to SEQ ID NO: 11

SEQ ID NO: 377 - DNA, 4156 bp, Homo sapiens
gcacgttcccagacaccttcccaggcgctgccagcctcctcctgcgcacagatcgggaggtccctggacttccacttgttgagctggactcaagccggatcgcctggaggatattctcagggcacagcggctgcctgcgcctgagcagtgctgaggagatgccaaggtcaggcatcagctttcagagaatgcagctgcgtcagagatggagacacgcagagccacgtgtcgtggagaatctaaggaagttcgctggcgccagcagcgggaaaaggccctggcttgatgaggggaactcgcagccttgcagcgcgggtgggagccccgggcggaaccgcagaagcatccccggccgtggggttttctcctccagctggagacgtggagggagtggagcagagatgagctgtgagctcagcagttcacacaggacgggatgggggaggagaacccagggatgggagagattggagaacaaggagctgctgggtctcagcctcgtgtagacgacagggcctgtggggatggccacgcgtgaatctggtcctggcggggagcgtccggcgcgatgggagggacctgcagccagtgatcctcccgtggcatcgcttctagagttgagaggagaaagccagtagctgccggtctctggtgggtctcacagatgctggagcaggtgtaggaggaagcgcctccagcaggagtgacacccccatgccgcccaggaaggtgtcgcgcctgttaggagggaaaggactcaggatgtgcgttgcatggggttgtgagtgagtcagtggcagcccccccgcctcctcctcctgctttgacctgatgcaggatggactcagcaccccgccgaaggcactcccattcccctctgcatatggttttcatcatgtggaccttcaatagctatttttgattgatgggtattcagtgggattcaacatccgtaaacgttctgacccaagtcctgttgatcaatggcgtcaccgcacggcctttttgacccaagtctgcaccattctgtctttcctggagtcacccttcgagtgctctatgtgaccgtggcctcctgcggagtctgcccttggctcacggctggacagacattggctcttggcgtctctcatgttggtcacccctccagctgctctgcagcaacaatgcccctttccattcatagaaggtcgttatcgtgcttgcactcgggactgagttcacattgccttctacctgccagagaagctctgagctcctggaggaatgttccttttcttctgatgaaaaatgacgaggtgaacccctcgtgcctcggcgtaatgtggtcatcagaggtcgtgagaagagcacagaaatgcgtgtttctcataatcgcctggatgctaatcactgcgtcaaaacctcccgtgagccgctttctccacagaatggaggtggccgggcgcggtggctcacgcctgtaattccagcactttgggaggccgaggcgggtggatcacgaggtcaggagatcgagaccatcctggctaacacggtgaaaccccgtctctactaaacatacaaaaaattagccgggcgtggtggcgggtgcctatagtcccagctactctggaggctgaggcaggagaatggcgtgagcccgggaggcggagcttgcagtgagctgagatcgcgccactgcactccagcctggacgacagagcgagactccgtctcaaaaaaaaaaaaaaatggtggaaatgccccttcctctaactgcagctgtgcacatccccctggggacagacccaaggcgccttgagatgctgaaaggcgttctctgtgttctgagtggaagtacagcctggaaagtccacggagactctgctctgagtgagccgagctggacagaggggcttttgagtcaaagttttctcctccttgcactttgccagaaaatctcaattgctagtgaggaattcttttcctttctttccctaacgaaggagatataagtgacagccacctggtggtcaggagaacaaactgccgccgtgtctccacaccctgtgtgtcctgaacaccgctgggaagccgtcagcagacgctccgcaggccaccggggcgatcggggcactaaaggccaagcaggcttcacacactgccaaagtccaggtgaccagagagtatgaccggacacaaaggtgggacaagccgtttctcattgttactgagaagcaactgtgagtgaacaaagcttacagagagatccgagatcagatgggtacccatggcaggaggggaggcgtttatgagagtccccggtgggcacatattaaaaaaagctaagtagaaaaatcactgagaactcataactggtcaatgagttcaggtagacaatgagggagggtttggaggatggcgaaagatcaaaggggccctgatggagtgggaggttcagagggaggagacgctgccatgttcagcctccaggagccaccacaggttgtgcataggtgctgtgttgacttctgctgaggaaattcacaaaatatacttcccccagagaaggaggaatgtggagcaggcgttaaaaagcagcctgcactcaccttcggaggccctcggtgggatgtcctcttcccagccctttcctttctctccctcgggtgccttttcctgcctggtttccttggttattgtgtttggaatgcaactttgactagttgttgaatggtgaagtggcaaatggtaggtggattctggcttgccgcacccatcccacaggtggaggtcttgtgagaacgactccagcagcctccagacaaatgactgttgactaaagtgaaatgttatgcacatgaaatgcaagagatgactagacacgcactggatggaattccacagcaggtgggagacttgggaaagatccttgttttcgtaagaaaacacaatctcagctgggtgcggtggctcacgcctgtagtcctggcactttgggaggtcgaggtgggcagatcacctgaggccaggagtttgagaccagcctggataacatggtgaaaccccgtctctactaaaaaatatgaaaattagctgggcctggcggcacctgtggtcccacttactcgggagtctgaggcaggagaatcgcttgagcccgggaggcagaggttgcagtgagccaaggttgtgcctgtgcactccagcctgggcaacagcgtgagatcctgtctcaaaaaaaaaaaaaaaaaaaaaaaaagaagagaaagaaaaagaaaacacggtcttcaaatcccataacctgagcacaaaagactcttggctcgctgattcgtctcccacctcctcctccccgcacagggacagatactgaccgggtgtgagagtaaggccccgtgaagacgaaccttggggagctcactggggtccctacttggaattttaaagcaaaaccatgttgctggaagtgaaatcctcttcagatttacgaattatggggctccattggaggaaacaatccctatgggccaatgacctcgtttcatcccaaattatcctctggttttacaactggttagtttcttgtatttccaggatttataaattgcaagtttgcttgtgaagtggtagaatccatttttgaatttgtttcttaactattgatagggctagtaaaattcaaatgattgcataaaccttagaaactaaggtcagttcagtgaacattcttggtgctatttcaacaatccttgaaggtttaacacgtctgtgatattactgtgtgatttcgtgttatcactgtcttatgtgcattctaagcatgaaactgtgtccagtagctgtttttgaggaccctactaattatacagctgatggtagcatcagccgtttgttcaatgttaaattattttgtattttctaaacaactgacattttctcctagcaaactactgataggaaattgtatgtgccatgttttcttccaacagtcttgaatatgccactgcattcctgcctgggtaaaagagtgagaccctctctcaaaaaaaaactaaaatgaaaaggcccaggatgaaatagagtgtttcaaaacccacagctactccccatcctttttctatcccaagagctgtgcctcagggatgtaataaaataaacatacaaactttct

SEQ ID NO: 378 - DNA, 289 bp, Homo sapiens; identical to SEQ ID NO: 133

SEQ ID NO: 379 - DNA, 727 bp, Homo sapiens
tgaagtgctgacgggtggagcgacacggaggagcctcagaaacacccaccatgctgctgcccggaagaggcaggcacggaaggccacgcgctctatgacctcatccatgggaaacgcacagaggcgaggcctgcccggggctgggaggagggggcacaggagcgccggctgtggggatggtgtttctcccgccgggggtggctggctcaccctggcactgcaccgcagtgggggtggaccggatgccgctgaactgcctggactttcaagaggtaaattccgagctctgctctgaggcctgaccgtccctggccgccaagtgtctgctgactgagagctccagctccggagaggtgcccagtacctggtgagcagagggacctgaaggagcaggtgcctcttcctcagacatctgcagtcacttcacagtgaatgaggctccagccgggtgccctgagaagtggccaacaccctacccaagaggagaccgcacaagccacggccaacgtggagctctaactcagggctccagcctccagcccagtccttttccttgagtagggacgacccccacagcggcctctctgcattgcttaggtggggagcacatgtggtgaagatgggcagcctgcaggtgcctgctacacgtgggggccacggccgacggaaagctcagtcatgagtgaaaacagaggaaatgtttctgaaaatataacaagtcagtggg

SEQ ID NO: 380 - DNA, 785 bp, Homo sapiens
gtttggaatttcagctgggcagcttcgatcccaccacctgtagccactgaggttcacaggctctgtttgaggtgttgtgttagattgtgctgggttggttttgctgcttattgagtgatgaagagcaacatattagctactgagatattttgcagaaaaaggaagagatgtcttcagctcaaatgctatcaaacttgtgaaataaacagcgttgttgctcacacaaagcctgtttggtagtctcttcacatggacgcgtgtgacatttggtgctgaagacccgggacaggaggactccttcaggagacgggtcccctgtccttgccctcactccgtgaggagatccacctacgacctcgggtcctcagaccaaccagcccaaggaacatctcatgaatttcaaatcgggaccccactggaaatcggactgtccaacccggcagccactcccagggcccctagaactctggccaaaggctctctgactgactccttcccagatcttctcagcttagcagctgaagactgatgctgcctgatcgccttggaagccccctggaccattacggatgctgagctttggataactcttacagtagaggattcccaactatatgaagacaccctagctggacgatcagttcttattaagaacctgacccctcaaactctacaacctcgatggactggaccctacttagtcatctatagtaccccaactgccgtccgcctgcaggatcctccccactgggttcaccgttccagaataaagctgtgcccatcgg

SEQ ID NO: 381 - DNA, 2444 bp, Homo sapiens
gaattttacttacttttgctttattttgttaatctgtaatttcttatttttccatagttaattacattacttgaacaataagaaaaatacagtttggtttctaccaaagaaagaacattgactgtggcatcagaaagagcagggtttgaacactagttgtatctctcacattttaatcttctgagataattgtcttgctggtaaatgcggaaataatacttcacaggcttgctccttttctcctgtttagtttaaatacaactatatacatatatacacacacatatcactgcaatagaaaaaaaaactgaataaatttattttacaaatatctttaatgtgtgagaaaagtatatttatttacagggtaagaagattgatgatgatgtgtgaggattctgaaggggatcgctaggcattttcaaagactggataagttagcctcccacttatccctatttcacctaaaaactgatttaacaatgatttgtttttttgccaggcattgagctaagtaaaagaacaaatgaagaaacaaatttaaaaactcaatctctatcctcaaagaagtctaattaataagtggagaatgacacaaacaacaagtcataatgcaatgtattaaatactatcatagacatattcacaaaatattatgggaacaaagaggaggaactgagtttcttactagtatcctatagcataatactatgctcatgttattataatttgatctcttctttggttctaaaatagattggtgaagcacctttctaaccataaacaggaaagaggagaaaaaaagtaatgaatatgaatgtacagaaggtgcctaaagtagaatcacagtgctgtgagcagtaacaagcagaagaacttaaaggataagctatgtacaaaatctccctgaaggcaggaaggcaggtggtggagtgaagttgagtcagcctccatcctgttaccatcagatggttctcaaatgcctggctggcatctggactgggagaacagcagatgaaaggacccagagtgggaggaaaatgaatcagtatgcgatcagcaaattgtaccttggattgggataggattcttataatttaaaaatgtgcctatattcaataactgcaactatttagagtaatggtagcctactgtattatcaggaagtggttaaagagtaaacatgttctggaggcagggagatacttgggatacagaaatgagcgtgctgagtaagaacacaattgcttcagaatgtgcaattcaacgctgaatacagggttccaaatgcagttaacatcaactaaagaatttagcgaaagggtgtagcagagtgtaagttggaattaaatatgggtccttggtctgatagagaacatttcaagcaagttcgttgtttatatctgacttagaaggcaatgagaaaccatacaagatacgatactgctttcttcacattttcaaaaatatctattttgatcaaaaggagttaggaagaacctgcatggtggactataacagataataatggaaggactattcggaccaaaaatagttaccagtttcattgtcctactatgtggaggggacagagctgagagaaggggaagagaataaggcattgagtggcgttctactactggtgtgtgccaaataccaatttcagcataaggactcaacccggaaggagccagctggagtccttatgctattcccgaggcctgaaacacgagtctagctggttcggcctcatctgtcaggtcacagctgcaatattacttcctcagggaagccctttctttcttcctcttctccatctccacccccttcccaaaagggcctcccgctataagctctcaaagttgtaattacatgtgtcttgtagttaactatttagagtctgtctccacgtccaggctccaaccaacctctcatcctcaaatgtcttcacaaggtcggtgatcttggcagttttactgaccaaagagtgggggctcatctccagcaccttgcagtattgacaggaaagtcactgagtagcaaatgaatgcatgaatgagctcgtgttgttaatattgccaggcccacaggaagcacccaacaaagagcaatgattggtgttcgcgttcattatctcatttaattcttacaaaaccacggcaaggattcaaccccacaactgctgtctagaaaaccgaggaaagtgacgcaacccgcgggaggtctgacggcccgagagccgcagcgccaggcccgggaccgcgtcagccgagcctgctggaaccccgctcctcgctgcagacgccgttccgcctgaggacagtactcgggcatggggagtcaggtgcccgccacaggaacgcaagagaccgcgccggaccagcgaaaaagctccatgctctcctggttttccaacccgacgccgcggcctgcggccactctag

SEQ ID NO: 382 - DNA, 3678 bp, Homo sapiens
tttgaacaccgcctcccaccccgcgggaagtgcgggcttggtttgtaccgcggtgacccccgccccctccgaagccgcagagccggggcctcgcgccagcagggctggagatgccttcttggcggctgagtttatttattataggaagtcattcgctcgtggggtatttatgtgatttggcgagtgatgtgcccggccagcgccctccttggctgcagccccgcaggaggacccggagtagggtgggatggagtgggtcgtgggaggagcgcgtcagcgcctgcccggggacccccagctcccgcgaggacacggaggcgcgcacgccgctcggttttcctggaaagtggagaaggagcgtcctgggcaggtcctctgagctcatcccccctcggattggggcgggtctgtgacggggtcacttaggacacgacgtccccccgccattcccttcccccgcccagggcgttcgcggtgggcgcccaccgccaagccccactgttcccaaggatgcgccaggtgcttcccgtagcgtcctgggttgacccttaaaaaaacagcacccctaggaggtggccggccctctcctcccagggtctctccgggtcacgatcttccaaagttcggaaactcgcaggatcgcgtgtgcaatctcccgctacctcccggggggccggggagaggtcagaggagcgagtcccgcgtccaccggcctcgcttgccccctgcccgtttgaggatagttccagggagcagggtggagtgtgcggacatctttggaggcagtgctggggcttcccgcgttggcggcgctccacccggcgtggggggcggctgcacgggcccccgcggtggggacgctgcgcacggggcaaggtctccctaggaagcgcccgggaaggagatggggcccgccaggaacccccctcactgaccagctttctgcacgccgtgcaggagggggccacttcctcggagagtattggcttttaattaaaacaagccctacaatttttacatcgggctgccacacttgtgtatcccttcttccttgaatttaaccaggagtgagcagtggacagcttcttccctatgagaaggaggtgaagcaggacctgaaatcccgtgctcagctcccacatgccccgtgtccaggacaagtcctttgctgaatcagcggcagacaccacccggagccctgcgggagcctttccctgttcttccagcatggatctgaaactcccttcccactttctgcagcctcccagagatagttcaggctccagcctcatgtgatagcatgaagagaaactggttccaacagctgtgtgctctgctgccctcatcccaaacaacagtttaaatgcacaattacgcttttctctaaggcccaaaataggataggaaagatcgttttgctatccctgaatgcctgtcacccttgtttcgtaagcaggaagtcagtcccagaatagttgttctgctccctcccttctaataagtgctgcgctgagtgtgcttgctttgccagatggttaaaacagagcaggggatagaaggacagatgtcttcaccctcatggagttcaccttccagtaggaggaggcgataggccggggtctgcacatgtgcgtgctacagcctgttccacggtgcgtggcgtgcggggcagtagagacaggatttcaccatgttggctaggatggtctcgatctcctgaccttgtgatccgcccctccctcagcctcccaaagtgctgggattacaggcgtgagccactgcaccctgccagaaaactcattcttctactccatcctacagttttccctaagagagaaacaataaaacgccaccacgaccaatggcaaaaagctggcacccactccacgacttttcatatctacacgtttgtacagctttatttttaagcattctgaaattctatgcaggagagaccccagctaggtttagggagtcctagggtttgtggagtaaatgaagtttctccctagaattagggagggtagagacaggcagagaactgacaatcctaacagctgctgtcctcagagccactgtttctgagagctgctcgctgagtgcttctagcgagttaaatggtgttcgcccaaaagacctgttcacgtcctgatcctgggaacctgtggctgtgatcttatttggaaaaagctctacattacgtctttgcagaagtaatcatgttaaggatcttgagaggacgtgaccctgaattatccggctgtgcttgacatccaatgactggtgatgttgtaagagaaagacggagggagatgtaagatatgagagaaggccacgccgagactggagtgatgtggccgtgagccgaggaatgcctggagccaccagaagctggcaaaggcagaaggagcctcctctggaccctgtggtgggtacgcagcctggcagatatattcattttggacttctggcctccagggctgtgagagaatacatttctgcagttttaagccacgcaatctgtgtccctgggaagcccaaatagggcgagaccttttgccaagtggtctccaagtgtcacgtcatcgaatccttctcccgggcttgtgccatagtctttccactttagagaggaggaaacggaggctctggggcacaaagccagtcagtggcggggcctgactttcaacccagcctgcatggggtcagagaacccactttccccgtggggcctgcggcctatgctaaggatgcttgttcatctctcctgggcccgggagtggttcttctggcctagaaggcaagagaagccagtctttcggtttcaaggtttcccattagtggagtcaagcaaaaatggtgtgttgcgcttcttcctgagctcagcctgggagcacggccttaacatgctcagtggatcccaagacggcagcatggcggtgccagcctggcagccttagctccttgcagctgtgcttgtgaagggagcagtgagtggcttccctctgtgaccaccttgggtcctaagtttcactggggctgggatccatgcgtcttgcaattggctaggaatttcccgggctttccctcccttccctgttcagggcactgggtgtgaggcattgcatccgttcttctgctcacctgcttccccctaagagtgtgagctgtataaaggcaggaaccaaacaggagcctccacgtgttcccagttcaagggcagtgtcccttgtgtgtttcttcaataattcagtggatgacttattctgcacggacactgcacacactcggccctgccgtctccggagctgggaggtgtggagctggctcctgacctatttacacactgaggagggatgtggaaaacaggaggagtcccagggctccaatgcaaagaggagcctcttcattccctctgccgtggccgtgcaagggacagcgccttgtgggattgtgtcctccacccaattatccttagcattagtttgctaaggataatggcctccagctccacccatgtccctgcaaaggacatgatctcattcctttctgtgtctgcatagtattccatggtgtatatgtaccgcgttttctttatcgagtctatcattgatgggcgcttcagttgattccatgtctttgctactgtgactcgtgctgcaatgagcattcgcgtgc

SEQ ID NO: 383 - DNA, 434 bp, Homo sapiens
gctctgccatggcggggagggttgggggtaagaaatataagacccaattccctgtggaggcggggattcggtgaaaccaatcccttgaatgtggggtggaaccaacatgtaactcaatttgctttggctctcactgtgcatttgagctaaagcaagggaagcatttccccttcccctggctgaaagctcagctgaccccgaggctcttctggtcatgcttaggtacagctatgactccatcttcaacccctagaaatccagcatcctcttccaacttctttctgctgacatccctttgcccttctcagaggccctacaggacttaaaatgacccccaccttggccctctctcctgccatggtccatctgatccacatgtggcccatgggaagaactcacacagccccttcactcatcctaatgcagtccctcct

SEQ ID NO: 384 - DNA, 811 bp, Homo sapiens; identical to SEQ ID NO: 82

SEQ ID NO: 385 - DNA, 2242 bp, Homo sapiens
agtgtggaaacgcccactgaggggcacacagtgaggcggccactggctctgtgtccttggggaagccccttctgcggtcccctccattgtctgcgtgacaaagtggacgtagaactcccccatttcctgcccagggcgggtgaggaccctgcacacacacggtgtgtttgtgagctgtgcagagtggggtctccctggcaatggccacagcctccaggggcgctgacacctcccgtctaactggtagacagtttctgcctcttcttgtttggggattggagagggaagtgcgtctggatgactactaagatgaggaggctgaggcctagtgctcctagcgggcttggtcaagagcaggaggcggaggtggtggaaggctgtttccctgcggtgacagaaactccatttgcaccagcttacattaaaaaaagaggagggagaatatggtcgagtgaccccaggagtgatagggagcactgacggagtttctccctgctctggatagcagatccgctggctcccagcttatgatccatgaagagaacgtcttccccttgggcttcaatttgaagaatcctgaagacgaccctgatggcctttcgcggtccacgtgccccttcttgcactaccgtgatggtcctatccacggacgccttctcttgggttctgtggttggatgcggaggaatcatcgatcctctgtagtggaagggaagggaggacacaccaagaccatgtggccccaagagccgtgagaggagcagaagcctgactggtgcctcttacatgtcactgcagcctcggggggggccaccaggaaaacacctgacatcctgttctctagtaatggtgtggctggaatcattcctgtaccaaataattcacccatttaaagtgtgcaatccaacaatgattggtatactcagagttctgcaactctcaccacaatcaattttggaacatttctatcatccctagcaataaatactatatcttttttttgtgtgtgtgagacagagtgtcactttgtcacccaggctggagtgcaatggcgtgatctctgctccctgcaacctccacctcccgggttcaagcaattctcctgcctcagcctcccaagtagctagctgggactacaggcacgcaccaccacacctggctaatttttgtatttttagtagagacagggtttcatcatgttggccaggatggttttgatctcctgacttcatgatccactcgcctcagcctcccaaagtgctgggactacaggcgtgagccaccacgcccggccagcaaataccgtatctgactagcactttccatttccctccaaccccctaatggtttcttttcccacaataatctaaatgtttaaggaactggtttgctaactcatttcttaatgacaagaattaagccagcacagcctctggtttctgacattctttccctacaaagtcattcatcatttatccttttttaagggacttccttcatctctgtgccttaggctcacttcctgactgtggggatcagctcctctcaccaatggtgagtagggagtacctgccgttaaacctctgtcaccacaggagagagatgccatggatggatgattttctctctgattcttggcattagttcattgggcaaaaattcagcttccagttaagcaccggcccatggaccgggcttggtcctgtttcccctggaagcactgctgggaaaccaagcccagccctgcagggcttcctcctgctgccgcccacgccaggatcagcctcctcttgccgctgcagccccgtcgctgcaccggtttcatcggtctgaagtccagctgctcctccttggcctctgcacctcagcacaggctactgcctctgaggggccgcccagccgtcgtcctcctcacaacctcccatgatcgtggccctgaggtcacctttccattggcgatgaacaatcccattgtcactccccatgggtgtgcccaccggaagctgctcatgggcaggaggggaactgttcaagctggtttttccagcccctaccacagcgctgggtgtgtaggtggacaagaaagtcattacgtatgtaaatgaggaagcgcatgaacacctgagcgtgtgagaattcggtggggtgaatgccactccaaatgtgtgtcaaatatgatgggactgaatgcaaatgaaagtgggtcaaggagatattcagaataaaatgagcaacttttcctc

SEQ ID NO: 386 - DNA, 1296 bp, Homo sapiens
ccagctggcagagcctggggcgggggcctgagctccaggtccgagaggagccgcaccgtcgggttggagatcgcgcgcaagggtggcctctgggtctgcatctgccccgcatcggccacaggaaaagcctggtccctaggcacggtcgtggttcgagcttttcgttctctcgcacattgaggtattcgctcagcccaccacgttgtcctcggggttattaggccccagtcacaagccctatgatgttttcagacttcccaggtggagataaaggaaaattttactatttctgcagaacttctgttgatgtacagcattgtatttagcaacttctgtgtagatctgaaaataaatacattaccaattgttagttgcgtttttattaatataaatcttagagtacttgattttgctgttagctttacttaggtaaattatgtggcactctagcatttttgttgttgcatgttccattgaactttgctctgtgttttccatttattccaaattcaaaatagactgtaacttcccaatttattctatgttcccaaggcaccaggcatagtaggtgttttatgaatacctgttgacttgaaatttctcagacttttaaaaaatttttcattactgacaaaagatggagcgataaaaagattcttagtacacttcctattattgccaattctattagtaatgtatactgcattacaacttctatacaagcagtaactcatttgctcctcataagaaccctatgagagatgtggttttactgtcatcattttaggagcaaattaaggcacaaagaagtgacttacccaaggttacacagctattatctggtggaagcaggatttgaaccctggcaattgggctccaaagtctgatcctttgtctataatgttgacaaaaacttgtggatgttgtggtaaattgctttctctccatttgaaatcccattgagttgaagagatagacgcatagtgagtatacgtcccaaggaaatgtattatattgttttctgggtttcagttaattcaaataaaataaaaatagtgaagcaaagatttggactagatgctgtgaggttttgtgtcagcatgcaacagtgtcacaacagtgtcatcaccacgtttggttctgtgttgtggatgtaatattttgccccacatacatagaaagttcaatgaatagcactgaaccacatatataccaaattaaagacaacttttgatattatgtattctagagggaatctttctggtatcagaatattcatactactgtcattgggat

SEQ ID NO: 387 - DNA, 375 bp, Homo sapiens
aaccattacaaaaagtttccctacaacaagatcacaaagacagaaattaaaatgtattcagtggaactcacagtttaaaattctgtgtttctgatgaactctaacattccaatgttgccttctaagcaaactgaaagctgccttatacagaatgaggaagagcacaaatactcggctgaatgaggtatcgcaaaagactgcatgcactttggagaaagacttgagttattgtcatacaatttccattctttttagctttttcttaaatatatgacaaatacctatacaaagagtggtatttcagtcaatatagtaaatttattttccagactgaccttcagcttaaatatgccagtgtgtgatttaatccatagg

SEQ ID NO: 388 - DNA, 915 bp, Homo sapiens
ctggaggccagggctgagggaaggcctggagcagagccggtgcgcgacctcgcagtgagcagggagggcaggctggggacgttcaccacccagaacgcctctgctccccgcaaccctgagactccaggctcccctgttcctccctccgggagaccctgcccgtcctccccgcggggctccttcgcagttcgggggaagggacgggttgcgtcctcgggacctttctctgcagccacagcagcgcatcccagcacctcctccaggagccccgccacctcctgccacccggactttccccacagcgcagcgtcccctcgtcctctcagggctggaacagcggtacccgcagacagtgcaaaagggaagtccctgttgccttcccatgcaaactgtagggcgcttacagctgctgggagaggaaaggaaagaagaaatacaagcctgtgacccggatccaacccgcggcgcacagaccccggctctgggcacccctggtgagcgccttctgcgccagagctccgtacagcaccagcccgcgctctcccccagcttctgttcatttgctgcagtcctgacgggtcagttgcctgagcatccatgctgccatccatacaaacccaggcacgcagagatgtacatcctttacccagggtgacaccatgtggagctgaatccaagtccgggagtctgatgaccgtgtctgggctctgaccgcgcagccgtctcacagtgaaacaaattgcggactggccttgtcctgagtggccttaggaagctgcagtggcctgcagtctcctggccagtctgtagaatttggcaaagatgaggcaccttatagccttacatgttcttatttttctttccttttctcttctttattttcttttttaaggatttgaattagtatatgtaaag

SEQ ID NO: 389 - DNA, 3893 bp, Homo sapiens
gattctgtcgcgaaccctctcacggcagctatgagactgctgcgctccccagacgaggaaacctggtctcccggagccaggtggagtctcgctctgtcgcccaggctggagtgcggtggcgcgatctcggctcactgcaagctccgcctcccgggttcacgccattctcctgcctcagcctcccgagtagctgggactacagagtcttgctctgtcgcccaggctggagtgcagtggcgcgatctcggctcactacaacctctgcctcccaggttcaagtgattctcctgcctcagcctcctgagtagctgggattacagctctgggacaaaccagcttctatgtcatgagcacactcaggcagctcattggagagatctgcatggtaaagcaatgaggcctcctgccagcagccatgtgagtggcatcttggagccagaccctccagccccagtcaagccttcggatgcctgcagccctggctgacattttaaccacaacttcatgagagattctgagccagaatcacccagctaagctgctcccgggttgccagatcaatccacagttctccagggacccattgtggttttgtgcttcctctgtgcctgttctgctcctctccatgcaccccagcccctcccagtcccctcaacggtccttctggccaggcccatagccccctctctgccccacagtcctcaggctccagctttctcgttaggaagtgttagaaagttgctggagtgagaaatgagcctgtgaaactcgttgtcctaattaaacttccacaaggagagtgacaagaggcgacggggaggaaacggtgccaccaccaaggtctcagcctgggcccaggtcgaggaaggcctttgtcctgcagaacaaaagccactgtttgcacgtgttaaacttcatcaaacttcaacagacccaggtgcaaaaccccacatcccaaatgccatccgggcttatgccaccttcccgagcatggaccgtccctagccgtcaaccctaatcagggccatgccctacatcaaagctgcactccctccacagacagcttctgctctgagatgcattgttcctatgacttcctacactccgcccttgtctgacgaattagggcacggagcccccccatggcacagctgggccctgctggcattgttaatgaggtaggaagggcgcgtttgtctgagcctgggactaacataatcacataaagttgttgctttggaatagatggagctgccccagagtcgattttcttggaagcaacgcaaagcacagcttcctgggagaagacacaatgcctcctattgtctctgccacttcccctccagcctcccagcatttctgcgtctcctcgggagccactgccctgtgcaagagctgtttgctgatgcccagccgcggcttccaaaactcccgcgagaagtcgtttctgtccacagtcattgtttccagaccagccgagccaactggggaggagaggccaagcccagggagagcagtaagaggcccagcttgcaacacaggcccccggcggctggagtcggctcatgggttgctggggggcagctggtgccagccctgctagacatgtccagggtcggggcagaggccagggtggctctcatccacaacgaggctccaggaagaggctccagagggcccaggtccctggaggaagacagagggtggattatccagtgagtcctcagattgctccagggagactctacccctaggccctcatcctacctaggactgaggcagccatctgggtctctgcttccctaaccacttcctcctccacccgaccatcacctagtctcaaggacttgggcagcttctggaagtggctgagactggaagaatgttgtcacacctaccagatatccctacgtgtatctctaccacccccactacatattctgaagaaccaaggtgagctgggggaatccccaggccagcagggcaaggcctgggcaggaatggagtgaggaagtgagaagtggggatcttgggggtgggcgggctgtggggctgggctgtgctgcacactgggcaggaggcaggagatggcaatggaagcgacagctccccatcttccccggctgcatacgtgagggattctgctgcattcactgagtcaccaaaggacactggaaggccatcaggatttttgggtgaccaagacatggctcccctcttactgcctgtggggagacaggcatgtgaacacccaagtctaacccaagctgagttgactgagggccatttaaagattccacagaggctgagagcagtggctcatgcctgtaatcccagcactttgggaggccaaggcaggtggatcacttgaggtcaggagctcgagaccagcctggccaacatggtgaaaccccgtctctactaaaaatacaaaaattagccaggcatggtggtgcacaccagtagtcccagctactcaggaggctgaggcaggagaatcgctggaacccaggaggcaaaggttgcagtgagccacgatcacaccacagtactccagcctaggtgacagagcgagactccgtctcgaaaataaacaaataaagaaaggttccaaggatggtctggaggacaaacaaaggaggagatttggtgcaggagttaggacaaagactcctgggacagcagccctcacttggggccatagtgaatgaatgggggccttttgcagaagggaaatggaggacatgtgtggtgaaggctttgctgaagcatctcttataaaaggggcaaaagcacttgctctcctcccagctctggctcagcctctctctcttcaagtccctggcatccctggaaaaccatgatttttccattctgcagccagcccaggcacctcctcccacccccgcacactgcagtctggtgtgtgtggtgggcacacatagaacacttgctggtcttgaaaatgaagccatcttttggggcccctagaaatcaaagagacccacttagccaagatatcactcttggacaccagcaagggtgagatcacttgataggtattttgccgtgtgtttctttttaactatataaaaaacaaaagggtggatgtgcaaacccaacccaagaataccttggctcaggctcaactagatgaaacttttaaaaatgatttaatgttatgttagactgttgcatattaaagcgatgtaatgccttctaagaaacgagagtcagatcctgaaagcgatgacttgggtaaatgtaaggagttataactcacttttcaagagagcaactataaacattttgcccaatatgtacagacctctaatgacagtgtgcaaagactctttcgttcccagattatgaggctgccactttctcctccccttcctgagccgcacttttctaaacagcaactgtcggggcagggggatgggaagctcatgagagaaggaaatatttgggaccgtgtcggccagtggaatggggcttgtggtcaccgtgttacagagtcaaatcacttcccagtaaacaccagtttccgatggctctctggccagggttggccggggacaagcagggagtatatgtgtcgggtacgttgcgtcacaagctgtgcagctgtgtaggcctctctgtccagaggcattaatggaaaatgattgggcacccagcccacagcagatgcgctgaggaatccagccagggggagctgggatgcagtgggagaggggacacgcagggcctggctgagaagcctcgcgaggtaaccacaggcggaaatctgaaaaatgaagacgttcccaccagttccagaaaacagggctaacttaaaatgcagcccctttccttgaagtgggcttggcaggccccaggtgttgaaaggc

SEQ ID NO: 390 - DNA, 657 bp, Homo sapiens
gcaggccgcgccgcccgggaacttcctcccctgcagagaccacctcgctcccgggactcgccagcgagggatgccgccggccgccgggggccttctccaggaccaggagagaaatcctctctccgcttcacgacgcggccactcccacccctgagacgcccacctggcggactctgagggaggattcggctgcgtctaataccacctccacccctcatccctcacaatgcgcggaaaaccacaggcggctgtgcgcgcagcgtcggctcagccaccgcagctcctcccctgggatgaaaaagcactctgacgtcttgaaagctggcagctctctgtttggaaaatctctgcccagtgaaaaaatgtaccgacaagattactaagtaacacagtcttctgggaatgccttatcaatgccagctatttgaagagcacccaaagtcaaactagtgctccgcgctggcagtctggaaaaggcagatgtatgtgagtagagaaactgatagacaactagttgctggccagttggcctgttttcgtgctacaagccttcagaaaacagtcgcctccttttaccacgtttctatttctaaaccaaaatgaaaaggacgtttgttcaaaagatattctcttgggctttacattgctttccccctg

SEQ ID NO: 391 - DNA, 771 bp, Homo sapiens
acagaatggcctggcacggtgaccacggagtgccctggcaccggtgcccgcggctgtgacggaaaaagggtgggaagaacagggaagaggaagcagaaacaggcactccttgatgaaataagtaagaaagcttgtcaagagccatcactcttgctcatgggacaagagaaggcactgacctgtgcccaccagcaccccatcactgagccaacaccaccttcaggaagacagtctccagcagggcttcccccaattcccctagctgctttgcctctgctactccggtaagcacctgcagggaggcaggcaccccagcacccactagcattctgcaacagctgttgcaccttggctcccccagtacagtggattccaaacctcaaggagtcaaagaacagatggggcccaatacaaattccccagaattacaacatgccgtccaggagttgagagctgagtgttgaccttctaaaatctcccagaaacaaagccaggtggctgaatccaccttatattatagtcaaaccctcaaggtcatcaaatcatcaaataggataaaagaaaaaaaaatccaaaggtcagcaacatccaagattgaagacagataagctcacaaagatgagaaagagtcagcacaggaaaactgaaaactcgaaaaaccagagtgccctctttcctacgaacagccacatcacctctccagcaaaggttctgaactgagctgagatggccaaaatgacagaaatagaattcagaatatggataagaatg

SEQ ID NO: 392 - DNA, 2337 bp, Homo sapiens
gatttgaacatagacaatttagatttaacatctgtgcccttaaccaacagaatctagcacatgctgggcccattaaggccccttaaagagctttcagaagacaacctggtacgatggccctgccttgtgtcactattttattcggcagttccagcctggttctgtcacattgtctcatcacaaaattggattgcacagaactcaaatggagaggacgttcaaactcaggaatgtggagcactcatcatctgctgtggtcaaagagacaatctgtgaagaaagtgaacaaggcagatggagataaattcaaaaacagagatccgaaaggctgctaagagagaaaggaacaggaatctcccagttcctgagagcctcccaggctttctccctcgatgtttaaaatttggaaaacaggcttttcctatccggatgaacagagataatttgtgtcgatggatgttctgtgaaggcctattgtgtcgagcagcgtattaaaacataaacatggctcttcccccaagaaacttacatttcagtaagggagcctggccaaaatggaaaactgcaaggttcaaatcctggagtgcagaagaagcattaggcattgaccctgtggcttcctaatagatccgcaaagtgctttgttcctggaaatcatccgatgagtagttcagtgctattgtatatcttgttagagcagccgaagtgccacaaaatgaactaaaatctccctgcagagttgctgtatcatatgctgagaacattcggaactttcaacaaattcatgttacgatcctgggtagccatggttaaatctgtacaggggttaaatgagaaatatgagcctgctgttaagtgtcttctgagagtgacaaagctctggccataagggatgggagaggagggatttcttctcagccttccagccctttccagctgtatcacagacaggagacataatgcaaaggggctcagacattgacttcctggatctttgcggccccaggcattgaccccctctacctggcttttcctacgctgtaaaatgaggatcctcctatattatggagtttattgtgacaactaaatagctgagaagaaggacatctcatttgttttaactatgcagtttcctgtctatctatctatctatcccatcaatctatcaatcaatctatcaatctgtctatccctatctatctatccatctatctatctatatctgtctatatctatctaacatttatctatcatctattcatctatcagctatcttctgtctatcaatatttcaatcaatctctctatccctatcaattaatctatctacctacctatcaactatccatctatctctatcatctatcatctattcatctatcatttatcatctgtcaatccatcttcctactatctatcaaaagcaacacattttcttcctgactttaaaaatatttaagtgggccgggaggatggctcacgcctgtaatcccagcactttgggaggcctaggcgggcggatcacgaggtcaggagatggagaccatcctggctaacatggtgaaaccccgtctctactaaaaatacaaaaaaaaaaaaaaattaaccaggcgtggtggagggcgcctgtagtcccagctactcgggagactgaggcaggagaatggggagaacccgggaggcggagcttgcagtgagccgagatcatgccactgcactccagcctgggcgacagagcaagactccatctcaaaagaaacaaaaacaaaaacgtaagtgatactctgtccactcttttgattgaggaggtctgattttcaggctttggattttattatgtcttcaatataataattgttccatgtatctctcctaaattgccatttgaaaaactgcttttctgaagtttaaagtgcacattttgatacatcttgacacatatatacacccatgaaatcatcaccacaatcaggatagtagatctatccattaccgccaaggtttacttgcactcctttgaactttctccccactcctcaccccctgcctatccccaatccttaagcaatcactgatttgctttctgtcactatcagttaatttgaatttttcagaaatgtatataaataaaatcattcgacgtgtatgctctttttctgttcacccggtacaatttgagatttagccatgtttttgcatgtgtcaatagtttatttttttgttgctcagtactaatccattttatggatacagagaaatgtattaatgcaatcccatattaataggcatttgggttgtttccaggtttgggctgttacaaataaagctgctatgaac

SEQ ID NO: 393 - DNA, 451 bp, Homo sapiens
gcggccgcagatcccggcaacttgcgaaccgggaaaagtttgcggcgcctccgcggggcggcgcgacgcggcccgcccctcgcgtccgcggtcatcgcgggtgactttctcgactcgtcgtcagccggggccgcagcgcggccggtggggactgcggggcgggccggagtccgtccgagggctcccgcacctcgggctgcggcaccagacatgttggcatcatctcttagttgggccatgtggccagggaacccttcatgaaaccacctctgcagtcctggagagttgctgtagaagaaggaaaagagaggaagacaacacaacacaggaggggataagtacctctggacacaatggaagtagtagttgttgagcagagggaaagggataggagaaggatgtggactgcagtgctgcagtgccaggtaataactttgatcatgtacctcct

SEQ ID NO: 394 - DNA, 1926 bp, Homo sapiens
cacaaacaactttgagtcccgggagggcggaggtggagagagattctccgcttggataagggcggctggatagccgagtactctcttttggggctgttggccgtctccggagtctcgggagcgccttgatgtcccttcccagggctcgggttcctttgagagaatcaagaggaaggtgtttttcactaggactcgcggtgggccccacctgcctaccgtggccggccgggagctattacagcagggtctgcccgtccgacgacggcggctccaatctggggtcccgccggcgccgacccctcagctctctcccgatacctgctggcctctctcatctttggtggcactcgccgccacggggacggtgagatcaaagaggtagacctaggccaggagggactgccagggctccttcccgcgggccagcctctcgtccttcctcccgggacggggctctttccctttctccggatgcgggcctttgagagtcagcgacgccttagactcctcccagaaaaatgcaccctcatctacccaattctgccctaccctttggagctcctggaccctctaaccgctcggtggggtcagagcccacccccggaagggccgctggtcggggactggttcgccctctcctggcctcctcggaccagtgcgcggggaggatcccgctaacgccgggcgcctgcagaccttgagcggcctcgccctggtgacctccccgggaaaggctgggcggtgcttccacaatgagggccacctgttaatttgcacgagaaagtgctgccgagggcccacacgtgcgaatccacctgtggagtgcgtcccctctctggggccaaggcctaggggaggccgaagcggagaagttgcctgaagactgggaagtaagagtaggggcgtcggaggaatcgaagttgcagtgacatcaggctcggacagccggcggactcctcgcaaggtgatcggatacttccgagagccccacagtcctcctgggcctttgccctcgcgtctgggatgcgctcgggcgcccccagtctgcgatgcgttcgtacctccagtagggtgacgttttcgccgggcccctctgcgaacagtctccgccctcctccactgtgagatatttcacagtttcacccgcagagggcaaccttattccaagttcccgagcgccctaggcctctttctcctccctgcctaactggcctcaaacttcttcatgggaaaagatggcttctcttttttaattgaatgaactagaagaagttcattgttattcatcaacttcaaagagactatatgaggccccttggccaggactacagagcagtattttttaatcagaaattatagccaaaaagaagagaccagaacacatggatgaagaaggaaggcattaaagattatgtaatttgctgggtgtggtggctgacgcctgtaatcccagcactttgggaggcagaggctggcggatcacttgaggtcaggagttcgagaccagcctggacaacatggcaaaaacctgtctttactaaaaatacaaaaattagccagatgtggtggtgggcgcctgtaatcccagctacttgggaggctgaggcatgagaatcgcttgaactcgggaggcagatgttgcagtgagcagagatggcgccactgcactcctccctgggcgacaaagcaagactccgtctcaacatcactgaaccagtagggggcagagctggaagttgagcctaggtgtgtctgactccacagcctacgccccgaaccttgactttgtgctttctcacaatgcctatggctgctgctttaaaacagcactttccatttgccttgttaaatgggattgtatatgaattatacttcactgtttatttctagagaaataaaagaatctaataaaggaatctgacacgg

SEQ ID NO: 395 - DNA, 369 bp, Homo sapiens
cgcaattaaacatgaaggattgtgaaggcaaaagatgaaccagccagcctagtctctggatgcataagctccaagtgtggaggagacccggagagaaaagcagactgttctctgtgtttacctgtaagcacaggccgcaacctgccatgctgtttttaaatgcccaagagctggtgacaagagggtttccctttgccatctggacctgattgccttagagcatcctacccagcttctaatctaagctcaaacacaccctccttcaggaagatttgctgttctaccttctccccaccaagcagagtgaagggattcttctttggaactcccactctcctttatttatctccagatggatgaaaaaggaag

SEQ ID NO: 396 - DNA, 217 bp, Homo sapiens
gaaacattttgcactgtgctgggggattctacccacataagtcagcatgttacttgctagataaaagagcaatgaatggagtacttcattttaaatgccgcaactcagcaagaaaaaaaaagtgtctggtatcttcctgaacaactacctggtattatacaggtgagataaattgtgatgccaccaaatgtcctatatataaacgtatggacatata

SEQ ID NO: 397 - DNA, 859 bp, Homo sapiens
ctccatctgtcacaaaaattaaggctaaatctcctctccagaagcagagggagccggggctccgacgcgctcagcgtcgggctgtctgcctctccctagaggccaagtgaatttgaaatggcaaaagtcacagccggaggcccagcactaggagattcctccggctgcgggaaatcttcctgtacctgctgaagctgctgcgttcctcagaggcgcttggtctgccgtgggaagctgcacctctgcagtccccaaaaccaaaatcaaaccttaaaagagccagactgaggcagaggtgctgagcagctaattggaggggatagtatgagcctccaaagattagggaagaaaattgcagttgaagaaaacttgctttggttcaatgcaaaaataatgggatgaatggcatgctgaaatatcatatgacttacgaaaatgatgaatggtttattgaatctacatatgtggaacccatgaatgggagtcggagaagggggcaactgtatacgcaaaaagctatcataattgccaaaatagtgataacaatgttgaaacactactgggattactactgttaatgactaccagtgatcaagcacctcccctgccccagtgtttgcctgccttgtttgaagacacgaaaaaatgtacacaaaatgatttagaactgttgaacttttcagaaaataatttaaaatcatctacctcataactaaaggtgaaggaaatgaagtagaaggatgttacataccttgttcaaagtgacatagctgagtctgcttggactgtggttcaagccatgcagcctaactctagaacccatgctttgctacctgactttccagacgtaggaggcaaa

SEQ ID NO: 398 - DNA, 1117 bp, Homo sapiens
cttaaataaatgtaaaatgaaaactttaaaagtgttgtaagaaaataatttgaatcttatgagagattataagggaaactgatctatctagatgtcaaggaaggcttccagtaagaggatctttgatatactatctggaggataagtaggagtccagaggtgaagaagtggatgtatgagaaactgtacatgtaaaggccctttggcagaaggacaagaactgagaccaggccagtgtgactgaagagcagagcagacagggaagaaggccaggtgaaaatgggggagggactgaatcatgccagacattgcaggccatgtgaaggactttggtctttctctgaagagtgatgagaacccattcaaatggtttattcagatctggtgggttttgattagaggtggagacataatcagatttgtattttgagaagatccttttgccttctacgtggagaaccaataggaggaggctggagcagataggagctgcctgatgctgctgcagcagtctagggtaccaacatgatgccattgaacatgggacgtgatgtgcataatcagctcttgggaaccttcaggtgtgggctacagcacctcactggaccgctgggttcctagtagagtggaggaagtgttcacttagccacaactttgcttcaccctggaggccaactgaggcatgttagtataccctctccctgtagttctggagtgaggacattggaaagctaaacagtggtgcttgattcaaggtgcttgatctaatttctgtggcctttgtctgaagagggaggaataagaacgtgtcaacctggaattcccagactggctgattgggtcacatttggaaagctgctgtgtgcacatctgattatcctgcacctaggactatgattcatttcttctttctcagaacgtgtatcagtttgttatattgattagcctgattgtctgaatagtgtctttctgtgtcaaatctatgaaagtttgaaccctatatgcttttgctgaatactgtatttccaatacctagtaattatacctagactgacacatagtgggaatttttttcttcaagtttaagtgaaaatttatttatttttttaaatctcca

SEQ ID NO: 399 - DNA, 2618 bp, Homo sapiens
agtagagatggggtttcgccatgttatccaggctggtctcgaactcctgatctcaggtgatccatccaccttggcctcccaaagtgctgggattacaggcgtgagccaccatgcccggcctgcacaatatactaggcaagttttgaaaaagtttaatggggaagtttagtccaaagctatggcgatccaaacaatgtggtaccagtgctagaatgtgcaggaagatcacaacccataataaagagttcacagcacactcaaggccagggtgcttatcctggcacccaacagaagggctactaggtgtatggcaaaaatgggatttcatatagaataaaggacagacttcccaataaacagtgttggggtaatttagaaaatacattccagatagatcagaggtttttaaaattttttttagagacagggtcttgctctgttccccaggctggagtgcaccggtgccatcaaagctcactgtaacctcaaatgcctggactcaagtgatccttccaccttggcgacccaaagtgttgggattacaggcaagagccaacacgcccagccagatcacagatttaactgtttagaaagaaataataaagtttatgaaataaacctcttagaaatcaatgatactgctgaacaccttaaagggttacattttaaccaaaaaaatattttttttagctctctgtccccagggtaactccagtgttaaagaggaagcagtacacactcacacactgtgggtgggagtataattgggtctgtctttctggaaggcaatttgaggcaatacatattacaagtcctaaaaatgtgcattcttttttattgttgcaacaggatatgttatgctgcagttaaccaattaaccctgaaaccccagtgtttaacacctaaggtttattttttttattcatgctacccgtccatgcagggtggcaggtgagggtaacatgaagggagaagggggctgctccacgtagtcactcagggatccaggcttgacagaggctctgtccctgggacatcagcatttgctgagggaagggaaggcagacactgcggaactgctcatgggcatttcagtgtctgtctggagcttcatgtgtcacctgtgctcacatttcattggccagaattagtcataggaccctgaatgagtacaagggggatggagggtgaagtcctgtatgcctcagaaggaaaggagccgcagatagggaggcgcgtacttttgagccagtgataacttcagaaaattaccctaagtcaatattctgaaaagttcgcaaggatgttagaagaacttcattatgtccttgactacaacagtaaaaaaattggaaacaacctaagtatccaaggtacaacctacatagaggttaaaaataatgtaattacatatttactgatatagaaatctattcacaatatagcattaaaagggataaaagttataaaacagtatgtataatatgattatatttcatggaaaaagtaataaaacacacacagatgcatagaaaaaagtctgaaaagataaaaactgaaatgttaacagtggttataatcagatagtgtaataacaggtgattggtttttttcccactcatctggaatttctttaaaaaaagtattatattatttatgtaccaagaaagcatttaaaaagggaaacaaaaaacagtactcttgggagagttcacttatccactccactcttctcattaaactcttatatttgatgcaaggaatgtcttcttgcctgtcacatcataagacgctgctctcacaactgacgtaaagtcgggacttcctattaaaagcagtacaagagggtaaaaacaatagcacagcctcacagctgtgaatcatcagtcctgcccatcactcgccaaaacatgcaccacttgggactctgccgtggtttacgggctcctgccaggtgccctgggggtctctagggcccaggagaacactttgccgcaaggctctgcaccgtcaaagagagtagggcactgaacaattccacttcaaacaaaagatccacaaacttctggtaaatggattccagaacatagatcaccaccaccagaaatagaaaataaagtctcctcttaggtatacatatttttaattaaaaacgcttccttactgtttctcccacttccccttttgctgtttcttcacacacacacacacacacacacacacacacacacacacacacgcgtgcgcacatacacagtcgtaagttcactagaacatttcatccagctcaaaattcttaccaaagccaccttcctgcctgggtagtgtttaaagccaactagaaaacccatattcttgagatcggtacatggaagaggcatgtaagtaacattttctagactagacaggagtccctctccatgccaaaacccccatcatctccagaatatatactgtttctttggggaagccatgtactcagaaattagggtccttttaaagcatgcatatctttaaaaatatacatggacattgatcttgcaagcttctagtttgcaagtgcttcaaaatctagtgatgtctcaaggcaatgaaagaatttagcttctagaaggatg

SEQ ID NO: 400 - DNA, 555 bp, Homo sapiens
gaagtccgagcaaagatgggaagctttgttttcaaatataatgggaagggtgtgtggaaacagacctggcaaaacaaaggcagattgatgtttctgtttgtgataccagtggagagaggagggcacaagcaggctggagtgctatggcacagtctcagctcactgcaaactctgcctcccgggctcaagcaattctcctgcctcagcctcccgagcagctgggattacagattcatgccaggctcagagcctgtcccggtgacagacgcccaaacaccttgatggctgaggaaaagtagagcgaggagggctctctgaagatgcaagcgtgtgggtgggacaagtacaggcagcagtggagatgaattcacttgggatggattccaaggttgtctacacctggagcagtcacagacttcaacatatctttaagtgtggtgccaccagtagctgagttcaggccactccacgcccagccactgtttctgttcaggccaagggagctgatgcgggaactcaccagcatcgtgggaagcagctgctcattgtcctttg

SEQ ID NO: 401 - DNA, 394 bp, Homo sapiens
ggcggagctgcgttctcctcggcacagacccggagagcattgcgagggcggagctgcgttctgctctgcatagaccttggggcacagcctcgctttgggacaactcggggccgcatcgacggtgaataaaatccttcctgtttgccatgtttgtggttggtggcagcgatggacactgcagccagccagagtgtagaaaggcattgggtgaaagaagattgccacggagacagacagcagcatggtcagtgtggtaggagccggccatcagcaagagctgctccatgcctggctgctgggagctagagcctgcagcccactggcttgcctcactgtagttggtggtggcagtgacagagactgcagcatgaccagagtggcttttctggctttg

SEQ ID NO: 402 - DNA, 394 bp, Homo sapiens; identical to SEQ ID NO: 401

SEQ ID NO: 403 - DNA, 2100 bp, Homo sapiens
taaaatattaatatttacataatttattgatataatattcaattgtttgataggtaattaatacattccgactcacccagcaagaacatttttgtggtgacaaggtaaagagtaggatgacaattggatgacccaaaacttagacctcagtaagtgaaaaacgtgttgttatcaatgctcctaacttgtatcattatctaacaagattttccaggcagtggcagctttagaatcctatcttctctcagtttccttttcctagtagctgccagttaggatgccaaccatccctgattttatgtaggatgatgatagccaggggcaaatgaggaagactcacagaaatctaggactaaatataagaattttaaaaatgggagatttttatggtaaagaatgtgaggtttgtagttttttaatctccacaggagaaatgaacaaatgattccatgtaagaacactggaagatactaaattccaccttgatattttccaggaatgtcagtcacatcctcagtcttggttgacttcctgaaagtgtcctctccagtcttgagggacctcctgctccaggaagcctgccctgatgtcccagccagagatggtcctctgaatttcccctggccttcacctggcttctctgggagcacagtcacaattcattgtatattatcactaattggatacttatttcatgtcctgtgttcacagtggtaactagcatgtatacattacttatagtttgataacagcctttctttcacatctactaaaacaatgataattcctaatattaattatatttgctgtgggtcaagtattcatttagggctttacttggagtatttcatgtaatccccacgcagccctgtatctctactaaaaagaggaaaaattagctaggtatggtggcaccacctgtagttccagctactcaggaagctgaggcaggagaattgcttgaacctgggaggcggaggttgcagtgagccgagattgtgccaccacactccagcctggctgacagagagattccgtctaaacaaacaaacaaaaaaagctttgctactctaagcactaaccgcttcctcctccaccttcccttctcagctttccttcccagaatgcagatgctatcctggagggcgagctgcccaaatgggatgtggaggcagcagcatgacgacaaaagatgcaatctgaagctggtggagccacaggacgggagctggacagtgagggtttcatggaggccgtgcacaggactgcccccatctgcagggacactgtggttattcagtcttgctgtgcacctaagggcagttgccaagcggtggcagctacaaagctggggaggggctctgtgaaccagggcctcctatggctcctgttgggtttgggccaatgggaggctccaagatacacctcagcctcgcactcttggctcccattcttggtgggtacaggttccccccgccttgtgtctgcaggcctagcactgggaacgacttccttctgagctactttctgagtgcttccaccccttcctggcttccttaatcctacctgcgcctctccaaagggtcccttcattcaattatcttcagtttaaccctttgagctgccatccatttgctgcacacagggacaggtggctcactgcttcacaggcagcaaccatacaactgtggcttgtcttcctacgtcttctgcatctgaataacagttcctcctaaaatgggagtggacatggcgggggtgtggccctgaagactgcacgtgtgcctctgccacactttctgcctcttctcaaaccaaaatgtagatgcaactcagcctcagcctggcaaacaagacagatgatgggaaagcatgaggacagacacaccccaggacctggaatattcatttggaactgcaagttccgtgagcctagtgggttcttaacagttaaatgatgtctctgtcgagattggtggtaacctgtagaaatgtgatttttaaaaatactttccaaaatttgtccacatttgaaagattagcataactcaatgaatcactttttttcaaataatcaaataatggcacaaaattgtgcac

SEQ ID NO: 404 - DNA, 371 bp, Homo sapiens
gccctttgctgcggcagctttctgttctccctggctccctgcacggaactgagctttggtgtgtgatgcgctgctggcccaggctacaccccgacaagggacaccgggggccccgggagcagagagacctcagagcagcctcctcctgcctcctgtggacggccggccccagctggtgatcccagccagtcccagctttcagttgctgcccccaccgacagtcctcagtccctccatgatggctcccccgacagccggcccccttcctggcccagctcttccgcctgaggacccagggccggatccggagagcaggtggcttttcttgagcgccaacattctgcccgtgggtgagtgaggccctggctacc

SEQ ID NO: 405 - DNA, 445 bp, Homo sapiens; identical to SEQ ID NO: 59

SEQ ID NO: 406 - DNA, 216 bp, Homo sapiens
attaaaacataaagtttgcattaaaggtcaaaacagtcacaagcctgctcaaattcggaaagaggggacggaaatggaacctcttcatgggaggaagaaacagggtcttgctctgttgccctggctggagtgcaatggtatgatcatagctcacagtagccttgaactcctgggcccaagccatcctcctacctcagcaaccagagtagctgggat

SEQ ID NO: 407 - DNA, 1538 bp, Homo sapiens; identical to SEQ ID NO: 46

SEQ ID NO: 408 - DNA, 1514 bp, Homo sapiens; identical to SEQ ID NO: 195

SEQ ID NO: 409 - DNA, 227 bp, Homo sapiens
gtcagataagcatcctttaaaaaaaagaaaaaagaaaagaaagaaaagaaatccatctagtttctgacgaattaacaggtgtacaccacactctaggattatcaccacgaggtgtataagatcccagaattcagcaacgatgttaatggggaggccaaagagacacagcccatttttttaggtgtattgtcagcctttggagacttttgctgtgtgtttcatagaat

SEQ ID NO: 410 - DNA, 996 bp, Homo sapiens
aggaactttgtctgtgatgaacagtaaggaataaggaagcggaactgcaggggatatgaagcaagctggacttggggagacatctctgctcgagtgcacgttggcctgatgacgactgctcttgggttcacgggttccaggctctgcccgggagcctcatgcaaactggtcccgttctacagacgaggaaactgaggcacagagtgattacggctgtccctgagctcctgcagccagtaaggtgatacaccaggatgtgttcccaggttgtccgctgggctcagtaacacagtctcaactgccctgtgacactgcgtgtctgtgcttgtggggaaggtgaccagaggccccctttcctccacgcggtgagcctaccagcaaggagacagtcctcaggtgtgaggatgagcctcgtagtaggcacagagaaacaggaggaaccttctggaaggtgaagcctcccacggctgggactcttggagaagggcggatctctgtccactcctgcccactccccagcacagacagagcaagcaggacagagggcccaacgtcccaggatactgcagagctcaaaggagggcagagagcatcgccccacatgggcgccgggagaaaggtgggcggggtgctcaggggcccctggccgtcctgaagtttgcctcagagaggtgtgggcttctcctccctcccatacacagtgtctctgaggatgaactgccatgtgcccggcggggatgccgtccctggcccttgctgagtgcctctgggacgaggtcagctgagcctgccatcctaactcagacaccatctcactctccaagtcccttctcggtgagacggggggccttgcacccacctcccagcccccacacacctgagggggtccccgttcccctaccccgtggctccaccacgccccacgcatcctacctgagggacagaggggactgtgagatgccccccacaggctggttttcctctttcacccataac

SEQ ID NO: 411 - DNA, 486 bp, Homo sapiens
gctgtttcccacactacaggccagcactgtgggctctcagtttattgggaaatggaaataagagggaaggacaaaagtccactgggaagcagactggacagaaaggaactctgagcagctaaactctgactaatcccagggtatacctgcgttttctcttcaccagatttttcctaccaggaagagcatgtgctgaccaacagacatgaatttcagcctggtagttacaacattcacagtatacccacatcactaagctgggaggcacattttgagacccagaatcctgacacctccatgccttcaaaaggacaaactgcggcctggaccagctggtgaaacataattctgaatcctgcccacagccttcggtggttttggatgaaaggccagcgccttgggagccctgcgtttgatttcaagttttaaggccggcactggtggagcaatgaatggtgaaagctctccccttaaaggagcacagtt

SEQ ID NO: 412 - DNA, 2037 bp, Homo sapiens
gctcaccaccccagtgacttcagggcagcccaccttcccctggcgctcctcaaacgagccagggagtggcccctgctcagactcccctcctgcctcccggaccctgcaggcctacccgccccagttgccctttgccctcctgcagccttctgggggtgctacatgtctgaggcccggtcttctgtcctgctcctcctgatggggggtctgggcactctccctaattcatcgcgaagactctgacacccaatgcccgtcttcaggccccggcagatgcagagaagtgggcttcacacccacatctgcctgacctcaggtgctggctcctgcagtcacagccctgagccccggcccctccaggctgtctcctgcttgtccaggtcttctctgaaagaggccaaacaagtttttaaaagtttaagaaaatcgaacagaggaggagaaaaataaagccacaaatatggaatcatggaataatgattccgtaataatggcccaccataattgacgggccaatccctttatccaaggcatgtgttgtttgtttgtttgtttgttttgagatggaatctcactctgttgcccaggctggagtgcaatgacatgatctcggctcactgcaacctccacctcccaggttcaagtgattctcctgcctcagcctcccaaatagctgggattacagacacccgccaccacacatggctaatttttgtatttttagtagagactgggtttcaccatgttggctaggctggtcttgaactcctgacctcaggtgatccacccacctcagcctcccagagtgttgggattacaggcatgagccaccgtgcccagccaagacatgtattcttacgcttgagatagaacaggtctaccagcattgaatagaaatcagggagtgctcactgtttggaagagaaggcagacaatgaaactgggtagacaggcggctgtggagcacggctctggcctctgagatgcctggggccaaagccaagggtggatagatctgtgtttctgtgcctcacagcatgaacctagataggtgatgcttcctgggagaagcaggtttaatccaggcactgctttctacaaagagctgttctcagagggcttctctgaggtcaaggcagggtcttctgccaaggcatgctgggtgggtggggtcccagacacccatggctgcaatgagatttgcaggagatgcagatcacctcagcccagtgttcttcataacctgtcccagtgtctaggagctccataacattcatcctgtgaccctaacactaaccctgatcctctacctaacactgaccctaccaataaccctgacactaaccctgaccctaacactgactttaatactgaccctaccagtgatcctgacatgaaccctgaccctaaccctcactgtatcgctgactctcactgtgacactgtgaccaagaccctgaccctgaccctaagtctagccctaaacctgatcgtaacactaacactgaccatgaacttgaccctaactctaacccaggctctaaccctaacccagaacctgaccttatgatactgataccctgatgctgacgctgaccataaccctaaccaccgccccaaccctaaccctgaccttatgaccttatgaccttgatcctaaccctaactctgaacctaactatgacactgactctagtcctgaccataattctgatcctactgctaaccctaaccttgaccctgaccccccaactcacaccctgaccaggaccctaaccctatgtttgaactaaatgtcttcacgtattagggatgttttaaggttcttgtaagtttggatgcatcttgctgacttgcattatttataattacaaacacaagcagctatgattgagctttgcagcaaatgttttccttctcttgacttctgggtcagtttaattaaaatgtgctttgctgtagaagtcaagctttttaaaaaaccattgaatttattggacaaaacacaatatgttgtagctgagaccacacggccat

SEQ ID NO: 413 - DNA, 378 bp, Homo sapiens
gccccaagtggaggcagcagcagcagcaggagggaggtgtcggggcagtggggccgcagggccagtcctcaggttggttactcagttgtcctccctggtctgtcctcaaggcgtgatttgggctggggttctggctgccgtccagccctccctggttgctgtgagcctggctctctagccagccctagaagtccgtgagttagttctctgttgcttgcaaccaagaaccctgacaagaaagaaaactggctcagagaggctgagtaacctgctcaagatgacacagcttgtgggtggctgagttggccttccaacccagattcctgtcatgttcctcaagccgacagcacattcctccacttgaatgctacatcttag

SEQ ID NO: 414 - DNA, 1390 bp, Homo sapiens
tggcaaaataacattaatagcatctttctttgtcttctatttatactcttaaaggactcttcatgataattcacagaggtgaggggcagaggtgataagagaacaacatcatgaatacctttcaaatacatgaatctgaagcctgtgttgcacagtgaatcaactcggggacaagctctgtgaggctcaagaatggggcaggggctctggcttcctctgttctgggctagagcctcctttggctgaatcagcccctgcccaccccagccactggggacccaagatgtctgagagccctttgtccctggcagctcaccggaaacatcttagacttggatcccgttcaaagcccactttccccacagcaggactgggatgaagggggccttggaggcatgctactctgtcacctttcccacctccacatgctttcaatcccatggcagcctgtgggtcctgggaagaaagccaagcacctcatctccatggaggcccaagattgtccatgtcacccctgccctccagccctagaactgcccaggcaggaatcaaggtcttcatttgacagatgaggaagtgaaggctcagagagggacaggaacttgcccaaggtcatccagcaaagtgaaggagtatccagagtatctccggaaaggaagagcccagctcccacttggagaaagggccgcgggtgcatccagcagaggggaggatggccaacgttcacacctctggctcccaaatccagcttcacaaaggctaagcctgcctgcctgcccctcctgctgagggccccacagtcggagaagccaaacccagacccaggaggcttcggtgatccaagagcaagccagtccagagccacagtccacaggaggtcactgatgtcccgggttcccctcccgggccagcactagggctagggggttataacacaggccacataagaatagttttatcggtagaataaatacatttttcttttttaatatggacacgtattttacaaaagagccccatagcactatgggaaattaagatccttctacaaaaaagaagatgtaacttgggtacagtaaagctctagagtgtctagccaatcccatgtggactgccctcgacgtgttgggcaccccctggaggtggtggcaggagcagttgggtgtggccgaagacccctgtgtcatttctctggcttctccacttggggtggccgaggtcaggagggcccaaggctatgcagcaggaagcagacagcgatggtggtggcgatggcggggagaaggcccagggtgggtgccgagctgctggcgggccctggcgggtcctgctgttgtagctggtctgaaagctggaaggggggcttggcggtccccgagctgtgggtggg

SEQ ID NO: 415 - DNA, 290 bp, Homo sapiens; identical to SEQ ID NO: 78

SEQ ID NO: 416 - DNA, 543 bp, Homo sapiens
tcttgtgtcttgtctataggaagggagtgtatcctggtgtaagacagcatatagtagagaccattgtcaattagggcctgtgaactaagacagggtgactggctaagtccacaacccattagaaacccagaaataatcaaatcatggagagattagaccagggacaataaatatggattaggcaagaatgtgttaactcagcagcccagggttttttcaaccctgcacattcaaagagggatcatggaaaggaagctgaatttgccaagttttgccacttgggcattgcatgcctatgtgattaaccaccaataaaaacctgggacatcaaagaataaataagctgctctaattgccaagaattcacatgtggttgtatgcagctttactgggagactgaagtgtatctgcatgtgattctgctgtgatggacacttgtaagtttgtgcctggagtctcctggactttgccctgagaatctttttcctttgttgatacgactctgcatccttttgttttaataaactgtaaacatgagtataa

SEQ ID NO: 417 - DNA, 410 bp, Homo sapiens
tttaaatacatggaatggctgttggtatcctcccggtcttcctccatggccgaaaaggaaaatatgctcccatggaaaccaggataacagatgaccagatggcttacattctcaagctagtcatcaagcctaactgagcatccactctgttgctgaaatgctgctggggatacaaagacaaatgaagtgccgtctccgttctgatgtgacaaagagactagaggaagatgaacatgtgaacacacacagtccaatgagaagaggtaggagggagttatgcagaaggtgccttggatacaaagaaaataagccaatacaagtcatttcttatttttcacacacctaataataaatggcatcaccttgacaagtcacaaatgttgtattggaaatccttagcaatatttttc

SEQ ID NO: 418 - DNA, 3742 bp, Homo sapiens
aaaaaaaaaaaaaaaaattaatttatatacatatttttactgcaggaaaatatgacaaggtaatgaataaaatatttcacaaattaaagtatatctcattaggataaaattctgtgggggagttggaatggaaatacaagattgaaagaaagtaatatctctgactgctgaagaggttatttctatttttaaatagattatgatagaattcaaattgttgtagtatctccagtcaaaggaacttaggcttcttgagaaagtggttgattgcaggtctaaggcaggaaaatacaagatgaaactggaatatcttgtgatggcagaaaataaggaggtgctcacaaaaagatggcacatgtctgaaggctacaggaaccaacctgaaggagctctccagtggaaatgctggaacaatttgagcaaacaataaaaaattataatattggattataacccacacaataaatatctgtgtgtccatactgatgtaaacaattgaatgagtgaatgaatgaatgaaaagaagaaacagttcttctccccagtaaattccaattgataaatgtagaagaaatgggagaaacaaaaatcactatcaggaaaacacaacagtaataattgttggcaagacctaccagttggtgcaaaagttagtgggtgaatgtttgaggaaaaacagaatatttgcataaccttagagtattttccccaaaataatcactaattacaaagagaaagtaataactttacagtagagaaacttctttaatcaagggatcaaggttaacagaagcagtaataagccacatcagcatcatgtaccccctggtatggcattgagaagggcacatgacttctttggtatcctccccaaaatgcataatctcaatcatgaaaaaacattagacaaatccaagttgagggacattccacaagataaatgatcacttcaaaagtgtcctggtcatgaaagataaggaaagattgaggaaatgtcaaggattggaggacactaaagagacatgacaactacgtgcaagttgaaatcctcaaatggatcatggaacagaaaatggtcattatgggaaaatgggaaagtaaaataaagtctatggtttaattaatagtattgtaccagtattagtttctttgttttgatgattataccatggttttatgagatgtaccattagaagaagctgaaggaggctgtacaggaactctctggactaagttggcaatttttctgtaaacctaaaatcatttcaatataaaaagttaacattttgctatgatattagacaccactggatatattaaaagggtgataaggcacttttatttttacatgttgttatttataatattctgaaaattgcatcctaattataaaaaattttggctgtcaacttagaaattcgtgaagcaatatgccttctttcatgattcttttaacaattttgtatgctagccaaaaagtttgaggaccactgctatatgacattttttctctcatgtctcagatgagaagcagggcaaaaccctgtgtgtctccaacttacctaacacaccatccgctgtaggattaggagccagacacgtcttgctgcaggccatgctcacttccatctgctctcttttccctgcattcttcttttgtgtcacttccctgacttgtcagtacttctaattctcatagtcctgctatcccctacaacctcgtgccttagtattaatagggtacagcagggaaaaactcacttagtttccattttgttcttggagaagaaaaatttggagacatttccaaaatggcatgtacatcataattcttattgccaacatttataagaaactttgactgtagtgattatcaagatacatgcttggaatatttattccctctttccccacctttcaaaataaggatttagagcaggagttggcagggccaaatccagcctgcagcctattttggaaataaagttattgggatgctgccatccccattcactcacatactgtgcatgactgctttcatgcttccatgacagagctgagtggttgcaacagagaccgaatggcctgcaaagcctaaaatatttactttctggacccttacaggaagtttgccaacccctgatttagaaagtgaaaacctaaatggggaagtcttacatactttaacgtatcttagcaagcactgttatgttaatgtatatggacagcacttaaaatatatcaataaacaattatgatcagtaaacatttatttagagcctattgtggcccagagagtgtcctgtgctcagaggctataaataccaataacaccccatctctcccctcatggaactcagtctcaggggagaggaatatgtaaatgataagtgcaatgcaatgtgacataaataatatcaagaagaagagaatcagaaaaaaaaggagaggggactgattaattctgtcagaagtagagaaaggcttaacaagataagtgatatgtattaaattgtaggaaatgttagataaacagctttctttagtattttttgagttagaaagcaagtttttagcttggggtcagaatatttttagagaaaaagtttaaaatgtgcctaaatctgaaattctggatttaaaaaagtgaaaatctgcatgttcctctaatacctaatgacgaattctaattgcagaaggatgccaataactaaaaccacaaaatgaaccctatgtataccggtgaccttctttactcagaattaattaacacaagcacttgtttcttgcagagcactttgctgtaatttagaacaaattaagggaaaaaatcattcaagtgctgttttcttcacaccatgaatatacagagcttggtaggagctggaaacccgactcacagatttaggaaacagtgggttcttgtccctgtggacatcagaacttgggggacggagagatagagaaccagaaggcagaacaaggaaaaactcaaagaaaggaatggggaggaatggaaacgtaacaggacatgttgcctcagtgagtcaccaagggctttggagttcttagcccaaaatgtggttctgtggaggctgaggacaaacttcaggacagagcatgccttaatcgatgtgctaagccactggctcgggcagtccttaagcaagggctcctctgatcagacaaggaattgtttccttcccttttactccagatgacacctaaaggtgcaaaagaaaaccatctctgcacactaccaaacagacagtgcgtgaacgaagcagaccctcctgaccacagccaaggactggagagcttggtgaaactggtgctcaaggtatacaggtgagaggagctggaaaattcattgctgacatggagaaatacatgtgtatcggggaaagggggcagatataagaaggatcattttggtttgtttgaaaatcacatatcaaagtgttgaggaaacagaagttatccacatcgtattgcccaagtccttattgccataaatgtattggacaacatggggcaccacaggagtaatatgcctcagaccagattggaaatggaacgtaccgtgacatacaaccaactgttattcttaacaaaatataggatctaaccaaattgtccatactggggtctggaacagatttttcctgggagcgaaaaaagaacacgaccccaaatccacttctcgtgtttttattttttatttttttatttttgttcgcac

SEQ ID NO: 419 - DNA, 1558 bp, Homo sapiens
ctctctctctctctcctgctgcattgtgaagaaactgcttgcttccctctcaccctctgcagtttcctgaggcctccccagccatgcggaacgctgtagaccaagacctggaattaacacatcagaagattctatgaggaaacccatttaaaaataggatgcatttttttcttttctgcacagggagaaagtttaagctctcctcactatgagttttcaagtataaaagactttttcttccacgattttgagaacaactgaggactcttgtgaccaggacaacagggaagcttgcagcaagatagctccaggttggattcatgcttcgcaccccaagggctgccagccagagaggaggagaagcaatcactcctgcagtttctgaacactacacagacgccaggtagcttcttcaggagaacagccctctgaggaggcaggaagaggaggcttatctttcagcagccggagctgctgagatctctgggcagattaagctctctctaatggatgggctccagcctggcacattcagtggagagggatccactcatccatcatcaacataatatggtcctccctgcacttcacagtgtcctcttgctattgaaaaggcttttttgccttctcaagtttctttgtcaacagtctacaggaagaagctcaggccgccaccggcagaggtgaatgcaagctcacgttttatttctgactgcttaatcattgcctcgatcactgctcaagctctgcctttgtttccaaaggttacctgtgggaaaacttctttttctatgctgaaattaatagggaggcaaagatgagtccactgataagcagagccttaaaactcacatagagaaacaactttgctggagtgtgtgtgagtgaaccactaaggaatcagatagtgtgatggcagttatcattgcaggttaagacatttctacaaatatttcgacatctccatatactcactcctttcccccctgagtggagagactcagctaccaagagaggaagctcaaaaaaaacagaagcttcaaacaaacaaccaaccaaaaaaaaaaaaaaactgtgggttcatcagaggtggtagggaagacaaaaacatgggaggagcagctgggcacggtggctcaagcctgtaatcccagcactttgcgaggctgaggtgggtggatcacctgaggtcaggagttcgagaccagcctggccaacatggtgaaaccccatctctactaaaaatacaaaaaattagccgggcgttgtggtacgcacctgtaatcccagctactccggaggctgaggcagcagaatcgcttgaacccaggaggcagaggttgcaacgagccaagatcgcaccattgcactccagcctgggcaacaagagcgaaactccatctaaaaaaaacaaacaagcaaacaaacaaaaaacacgggaggagcaataaaaaggaatccatgctttgatttttttttttagtgagaggaagggaaggctgctgcctctcacttctccctgttttgttgttcttttaagtagcatgtgtcactctgt

SEQ ID NO: 420 - DNA, 437 bp, Homo sapiens
accagcactgaataatattccgctgaccggaggcaccacagtttgtttacccactcacctcctgaaggcttccaggtttgggcaattatgaataaagctgctatcaacatccacgtgcaagtttttgtgtggatgcaagtttttgactcatctgggcaaataccaaggggtacaattgctggatggtgtgtggcggatcatatgtgaagggtacatttagttttgtaaggagccaccaaactatcttccaaagtggctgcaccatttgtgttcccaccgcagctcctgttaaagcccagcgtggagagttcctgtttctcatctgtgtaccacacccaccaccaatttcagatgaattaaaaaacagaaaccctactacaatgtggacacggcaaggacaaggcataattccaaacgaacactgatgaccgtggctt

SEQ ID NO: 421 - DNA, 1315 bp, Homo sapiens
gttgtgtccttggaagctgaatgaagaaccggcttgcaaaggagaagcgcgtgcagtcccggcgcggcccgctctgctcagttctccagggcgggccttggcctggactgcgtgtcgggaggactcgcgggccccgcattgccgcatgccaccggcaggtgtctctttcctggcttgggaacctattaactgtccggtcattcatgaggatgagtgtccccagatgtgcctgtctcagggcaccctctcctgggcacacctgattggatcaagctgtgcacctgacccaggctgggacaaccaaattccctctcccaggaatctggtattggactgaggacagccactcacctttggctaatctctttaggagagaagatgtagatgtgatagttgttgagggattatcctctgcccagctactcacagagaagaaagtggattgcagagggagacacgaagcagagaagaaagctggagaaggtggactgtctaggttcctagcagcttctcgggctaccttgaggccatctgcccttggacttcatgagatactgctatactcttctatgtcccttaatgcttacgtcagctcaagttgattacttccaaccaaaaggacttaactcagacaaggacaaagccaagaccatcagtgaggtttttttctttataaccaggtcccttacagcatcctggggagcactgtaggtcctaaatacacattattcacattattcactctccaaaggcttccattaggcaaaaacatcttctcatccaaggccaactagattaggaaatggcatttcttatggctttccatccccagagggcaaatgcacagatgactgcagttagcaattgactctgtgggttagtatttgctgagggcacacaccctgagacttgaatgacagaaatccccaggtgccaaggaggagactggcaattatgcctccaatcacctccctgttctgccgccctctaaatcagcactccccaccgcggtgaccctcaatgactggcaagacgacccatttttaaagggccaatttttaacagctggaaacaataaacgtcgtgggaggtgaagatgctgggaggactgatttctccttcgctgttttcaaaagtcaaaagatgctgggtgtaatggcaacagccacagaaagttagcacaactcctgccacggagcagctgtgtgatggtggcttccccagtccccctccctgggcctcggttcttacagctgcaaaatgaggaggtagaatgagatgctctttaatatccctttcatcttcaactttctac

SEQ ID NO: 422 - DNA, 882 bp, Homo sapiens; identical to SEQ ID NO: 191

SEQ ID NO: 423 - DNA, 761 bp, Homo sapiens
ctcagccatgtttagccatttttaaaagtctcacaggtccttccccaggtccaagaggctcttctgtgtcctgatgacaagtagctgcctagccgtggtggcacctcctatcacatgttaagggacccctccccagggccacacctggcagaaggtggcttatgatgttcgcagcttgaaagtagtgtaaaccaaagataaaattctaagcccactcccccagccatcggaatggacccctcctcttggccagggcactccaaagttaacctgaaaaaccggttcaggctgtgaagagaaggtggagtggacatgcctcatttatgtcctcctcccttttggaattcagcaaagctgaccagcatgaacattaacacagaccttaagtctgattagtggcatttacaatctatactctctgaagcgtgctacctggagtcttcctttgcatgataaaactttggtctccacaaccccttatcataacctagacactcctttctagtgataataactctttcaaccaattgccaataaaaaaattttgaatctacctataacctggaacctccccgctccaccttcgagttgtcctacctttctggacagaagcaatgtggatcttgcatgtatttgattgatgtctcatgtctccctaaaatgtatacaattaggctgtgcccagatcaccctgggcacatgttctcaggccctcctgaggtctctgtctcgggccattggtcactcagattcggctcaga

SEQ ID NO: 424 - DNA, 305 bp, Homo sapiens
tgacacctgtggctaattgaagtgaaatcagatcacagaggccatgagacccacgtccagagggccctaggagggagctgtgggctcagctggttgatttactctggcttgggtcgctgctactgctttgaggacaataagcttggccatcaccagacaccagaggatgctgaagggacagccggctagactatttcatggactctctgagcatgtcctattgcagtccaggtacaaacttttcctccagaaatagacagagggatgctgcttcccaatttcagcaaaggcagtggaaagatccc

SEQ ID NO: 425 - DNA, 561 bp, Homo sapiens
tgtggtggggcagctgcaccccgatgagtggcttgcagttcctggagccctgcaggttgttggagaggcagggagcccttctccctcctgcctgccctcttgcacttcctctcccagaacccagcactactcccagaggctctgagctggagccctagaaggaggcgctgcaaggctccgtgctcctggagcttcgagtctatggtatgagttaaacagaagggtatctcctccatcagatctacaggagggtgtctgctccatcagacctggagcttccaaggcattttacccgaagctccagcacctggcccaaggctgggctgtgctgtgtcctcagtgaaagaatggatgagtcacagctgaatgactgaagagctgaaccaggtccagaaagactcagccactggagtctgtatttcctgagtcgcctctcactgctggagctgtttatcatcgctccaactttcactaaaaaggaaaaactatcacttaaacaaagccattgaaaccccagcatcatgtgtggattttttaacataaataaatcatacaaactaa

SEQ ID NO: 426 - DNA, 1527 bp, Homo sapiens
gtggcccttccttagcaggtggtggagagaggggcagtggaggagcgttaggacgagatttggggtcatccagccggagagagggaggccgaaaggagagacgttttcaggaggtggaggcttcagcatttggatgcctgcgaggcgggagaggccggggagcctgtcttgtgctgagaggctgggtagactgttttgtcccctacaggctgatcaccagttcctcttaggaaccggtgaacctcagggggcccattgcacatccaggtgtgaaactgcggtgtggcctccagccaacacaagccatcagccccatgctcagctcccagcaggcagagcgttcagaagcgccagcgccatcatcttgggagcctgcagtccacacaccgctgaccttacctacttcctctttccaggtcgtagattacagactctcctctgggaaattgcccccagatctaacaggagtacaagaagctgggtagattggaaaacagcaccgaattcccctggaactgaggacggaagccttcccagtcctgcagccacctgcagactctcacaagcacggtgctcccgggagaagaccttgctaccccaggcccaaggcagtcgagagaaaacgggaagccctgaaggtttttcaccccgggggtgagagtgtatgatcgaagatatatttgagggtaattgtacagatagtcccaacttagcattgttcaactttatgatggtatgaaagtgatgacattcagtagaaattgtacttcaagtgccaatacaatcagtttttcacttttggtgcagtattcaataaattacatgagatattcaacactttactttaaaataggctttgtgtaagatgattctgcccaaatgtaaggctgatgccagtgctctgagcacatttaagggaaagctgggctaagcaatgatgttccacaagttaggcatattaaatgcatttttgacttagaatattctcaacttgcaatgggtttatcagaacatgacatcgttaatcactcaaggagcatctgtaccactaatgacatagatgctggttgcaggaaggcagccagaggagggcacagtgtggaagaactcaactttttaaagacagagatcagctttaaatattgctaagaaagaacttggagagagaagttggtgataccggagacagcaggcaacagacagagtgagaggcccgaagaacaagaggaggagggagtctcttctgggagcagaaggagtgtcgacttaaatattagggagccaaagatgaacctcgcagagaacctgcaaaacccagttgcagaaatacctgcccacacctaaaaactcagtcactgaaagtctgaagtcaaatgattatgtgaaatcttagtagtgggtacatgtggtttcattagattattctttgtatctatatttgtactatcttataagcactataagttttaaaaccatacaagaggctctatggaaaataaattggacttcattaaaattcaaaacgtg

SEQ ID NO: 427 - DNA, 358 bp, Homo sapiens
ctgaaatattccaaagcaacgtttcactcatccttcctcccagattcttttctctgctgcagtcaattccccctttttccatttgtagagacaaaagggaacattctataaccactggcctctgtccaggaacacaggagaaaatgaagcaaggcaaacaacagagaaaagtgaacaacaaaagaacaaactcaaacgaaactgcttaacaatcctacagtgcagacctggcagaaatataaagcccacagtcatgtcctccagactggctcttctgtctgctgattagctttgataccatcttcaatagttagccagtgactccagtgtcagcaaatttccttcttctattagagac

SEQ ID NO: 428 - DNA, 762 bp, Homo sapiens
gtctgcgtggcctgctcggctcagaggcctccaccacggtccgctccctgccggacgccgcgctgctgtggccgcggtggttctgtggctgtgagggccgtttctgtccgtccacaccgccttccctctgcagatttcctctgcagaggcccggagttaccagcaaggtctgacgcagcagagtgcagaaacggcctccctgtctgtcaaagtggcctcccgaggacacccagcgaggccaccagatcatcacgtggagtatcggtggccttattaaaacaaaaacaacaactccacagcccggcgagcgcagcccaaagggatgagaagatggatatggcccggagataatgcacacctctcgtggggacagtgtccccatccccctccggctgcactgaagacctggagcaatggctgccatccatgcgcgaggacccctcggaggttccacctgcacagaccttgctaagggtgaggtgattactagaaggagcaccttttctagttaaaatctaactagattctccttggcaacttgtcttacagaaacagaaagactgtggggagagtccgttttcttagagccgtatgaagaaatcctaaaaaccaactgcccaatctcaactcgtaacagggaacctggggagtgacatcagagattcccaatgttttcctcctcgttgatccctgcgatgaaggcacttgcccatgtgtattctgtagtaggagtttgcattctgaaactggtctttattaaag

SEQ ID NO: 429 - DNA, 400 bp, Homo sapiens; identical to SEQ ID NO: 136

SEQ ID NO: 430 - DNA, 520 bp, Homo sapiens
cctgcccactgggtgaaactgcaagtcgagagcgtgggaaaccagcaagttgagagaggatccagaagtaaccccttctaaaacgggaaagatgccttccgaaagaccggatggcctggtactggtcttctctagactgaaggtcctccaccaggtctcctgctgctgctacctaagaaagaaatctcacaagggtgttaaaagcacttggccctaaagagaaaacactaggaggatgggaaccagggacagagaagctacttgctctgcagctgtttgggccaatgatccaatggccccatctagactggagacaccaactcatgactcagctggccttgtggcccacacccagaagtggactcagtgcatgaggactattttccacactcctatgatagcatccccaaccaatcagcaggaccatttcctagccccttgcccaccaaactatcttttaaaaaacctggctgggcgcagtggctcacacctgcaatcccagcactttgggagtctgagg

SEQ ID NO: 431 - DNA, 220 bp, Homo sapiens
gggagggttcctagttgtgcaggatgcagaaactgaggctcagaagcgttcggccacgtgcatgcattgcctttcccattggtgctccatcgccagtaatggataagtaataagtaataaggtgcattggaaattcaaatttcagaataagctgactgccaagagggccctccccctgtcgggagtcccttagtccatgggaaattcacagagaaggaaa

SEQ ID NO: 432 - DNA, 1203 bp, Homo sapiens
ctgctcagcttttcagtctgggtctgagctgaaacctgctgcaagtctgacggtaccaaattacatatatatctgtcaaaatgatgtaggacctaaagtctctctgtaagttgatccttttgaccccatgattaggagcttcacaatgtggtaccacacctggaaacctccagaacaagatctcaaggaaacacaggaaattcctgaaacagcaaaaccccctatgtgaagacgtctgttattcctttgtgtatcaggagcatcactgttaattaactgttgatacacttaaaacagcttggttggcaatgtcctttttgaataaagaagagccaggtgtgtttttcaggatgaactagacaatgctgtcacaagtttacctctacatcttattgccttggaaaaatttcctgcatatcgtggcacaagatggttggctctccaggcagcagttggcgttgtgaatcagtcatctcagcatgtgtctccaagatcccacagcagggggaaaaagaggtggagggtcacatgcctggtgttacatactttgaggcagaggtggtaggtgccatttctgctcacagctcatggaccagaacaaagccatgcatacctgagagaggaccagaaaatattctgaagcagatggctatttggtccgtgttctgactaaaaggaagccacactctgtcgaaaacaagctttgtaagaaaattttgaagtatttacttatatctaaccattcattccaccttttctcccaaataacactctaatatcttgagacatcttgtctagggccagatttcataaatgcttgtgaggcaggagaataagttccagaggcagttcacactgcctaaagccaattcacactgacttcctataactaaatctaaaggaaaatctcaactttcctcgcccaagtaacaaaagaatcagaggttatactccctttgcaacctgccccttttctgcctggcagatgaaaaatgaaaagtacctatgactggtcccctcccacgaccagccagactggtcacggatcactacttcatttacatagggcgtaaaccgagtaaccaatgggaaacctctagagggtatttaaaccccagaaaattctgtaaccggtggtctccagcaggttgctcaatcttgctgccactctgtgggatgtacttttgtttcaataaatctgtg

SEQ ID NO: 433 - DNA, 369 bp, Homo sapiens
ggcaaaggaaaagtggcacggcaggaagcaagtcagatgagggggcctggtttgtgcgagaacatgacaaaccagtgttcctgaagcctaaagggaaggtgagacaaggcagaggaggctggcggggccaggtcacggagtctcctgtgccacactgagagtctgggcttgagcttgtggagagcccaaggatgaaaacagagaagtaattaatggcagctttcctgggccagaagaataaataaggaattatcttacaaacagcaaccatgaaattagaagtttggtaaaacatgttgcagaagaaccaggaaacacattgcaattgagcctgctgggtgctgctgcaagtttgggggtgaacaggag

SEQ ID NO: 434 - DNA, 601 bp, Homo sapiens
taaggaccgcgtctcccgagatgccagagggacctgcgtccgcactgccccagtgtgacccgcatacctaccggccccgaccccgaaccgcgtggcgtccgcccgagccctggcgctgctgggtctcctgctgctgccgctgctcgcagagcccaggaaactctgcccgcagcttatgacggtcattaaccagtttctgaccaaggacaaggacacctacatggacactgtcaacagataccacctcacggagccggaaagaaacacatcctctaaactcaaggactgcgtgaccgacacaatgacccccgaggagacagaggccgtcgtgcagcaactggaagaaatcaacaaccagtgtgccgacacgatactgaagtaacaccatccataggcacctcgggttcctgtccaggctgcctgtcccaaccatgagaatctgggcccagggccccaccctccctagctcccgccctgctgctgcctctactctctctcctgctgtgctgattggggcaagcctgggaacggctgccccccacctccccacccaggcctgtcccctgcgggacaatgctgcctaataaactcacctgcatcc

SEQ ID NO: 435 - DNA, 821 bp, Homo sapiens
cagtgtgaatccctggaaggcaagatcgccattctggtctcttgtggatatcaatgctgatctcagcttctgatgcacggcagtcaattaataaatgattgttgcctgaaaaactgagccccaaaacaatattacaagtttaatatcagtaaaggatttaatgctttctaacatgaagataccagaagttgctgatttttgtataacccagagatggatttaaatgcagagtgtatgaacttcttcattcctgagggaggacttatgatttcatgagaaatgccctaggaaaggggccggggagactgatggagaagaagagtttgggagggaagccccaaggaccatctgccccatcagagtcacatgcagagggtcctgctcctgccgttggaagttggcttcctgagctgctgaacgtgccagtcctgctgacccactctcagatatcacaggcacccgctgtgtctgacagagacctttctgcaagtacacgtgcaggtctgctctgcaaaggcgttatcatctgcagattattgcacagagtggctacgagctgtggtgtgatcctgtcacagagagagcctggtcacgttttcagaacagcaggaaacaggtacacctgtaagcttatacttatcagatttaaaaataaaacaaaaaatccatgctattccatgaaaatcggactcaaataaacttagtcactgatctgtgaagtaaataatctgatggtaatgcatcagttgacacttgggcctgggtttttaggcactaatgaaagccaggggcaaaataatttttaatctaccattatttcc

SEQ ID NO: 436 - DNA, 2093 bp, Homo sapiens
gagatggagtcttgctctgttgcccaggctggaatgcagtggcctgatctcagctcactgcaacctccgcctcccggattcacgccattctcctgcctcagcctccctagtagctgggactacaggcgcccagctaattttttgtatttttagtagagacggggtttcaccgtgttagccaggatggtctcgatcttctgacctcgtgatccacccgcctcagcctcccaaagtgctgggggtgacaataagaaatgctactctttaaattgccttccttatttcagagaccaagtgacagtgtttaacaccagagacacagtgggcacagttactttcatgggcagcagggccacagtggtaaaatgaatgtttttgacttgtgagggtctttggtagtatctctaggaataaaatagcctactaaaatatatgttgatctacataattagaaattatcaggtaagtagaattctaatttggatcaccataatagtcatggcccttcccccagttctgggagctgaacaattttgcagacctggagcccactgacattgctgcaatatatactaaaaatcattcttcaagccctaagagacccatggccattgtcatgggagaggaaaatacttgggactgtttcaggatcgctgaacactgactctcaactgttgctaatctctgagactgtatatgttgggtcaggctattttaggctttggtagtgtcatcaaaaatcccagtggcagacaacaaaagtgtcgctctgttgcccaggctggggtgcagtggcatgatctcggctcactgcaacctccgactcccaagtaaaagcgattctccagccttggcctcctgaatagctgggattacaggtgccccccaccacacctggctaatttttgtatttttagtagagacagtgttttaccatgttggccaggctggtctcgaactcctgacctcaagtgatcctcccgccttggcctcccaaagtgttgggattgcaggcgtgagccaccacgcctggccaacaaaagttaacttcttattcttgctatgtgtccactgcagcttgactgaagctcttttccattttatcttcactccagatggaggctgtggatcagcctctgtttggaacattgcttagtcttatggcagagggaaaatacatcataacaaagcacacatcagctcttagatcttctgtctaaaggtgacgcatgtcacttttgttcacatttcatttgcaagtcacgtggacaagactgcagttaaggaagtatgattcctcagtaggaaaggagccagaatatttggcaaacaatgatatattctacgtgatttcctgttatctctccattgcttattatcaatatttaattgattgctgctgctgtttcaaatatgttattcttactagagtaaatcaaaatggcttttgacatgtgggatgcagctatttatgtaaaatatactttttttcctgctgtattggttacaggcacttttggaaggtgtttgctttcacatggcagggacagcagtacatcttcacgatttgagctcaggtctatggcaactctcctgttctgtcataagcaaggcttcaggggtcttgataatcacaacatcccataaaatgcagaactagtccattatatggataatatgttgagcatgtgacatttctaggagttcagtggcctgaggcatgttggttatctccttcaaatgaaaacaaattgctgcatcatgtactcctatgctaggaaagagttaaaaaaaaatacttgacgggtgttttaggaggtaatatacagcacattttaccatgctgccctggcccatttacgaaggaatttgtaagtctgccggttttgagtggggcccagagcaagagaagggttgcagcaaattcagactgttgtgcaagatgttctgtcatatatggcacatatgcctgaagtgtccaaggcagatagagatactgtatggagccttcaaccagccctgaaaggagaatcacagtgcagacccctggcggtttgcagcaaatccatgttatcttttgcaaataacttttc

SEQ ID NO: 437 - DNA, 276 bp, Homo sapiens
gccatgtggaactacatctacccctggagaaagagcccaatgagaagtaatctctgaagcccagatttcctaaggatgaagcttcaggagaggccttatcaatcctgacaacaaacttttctcgtcaatttagtttcatttaatggaagttttaaatgtgtaaagttcagaaggctattaaaattggttccagctatctaagatacacacacaaccacacacgcgcacacacgaatacaaatatgccttcccaatcatctcccaaagtctcaactc

SEQ ID NO: 438 - DNA, 1790 bp, Homo sapiens
acgttcgtgacccaccttgcgccccccagggagtggcaggaccctcccgtccccagcctccgcgccaggcctcgtccctgcatgggacaagaggcagccctccgccatttcccgcggcccttgcctcccgggagcggctcccctctgacgactgagtggactgcgcttgagggggccgccgctgggaaccagcccctccagaaagagccgtctctgcacccgctcccacccgtgggaagcaccagatggggctgtctcccgagacaaagcctaaaaccaaatgtaccggaatttttggaaactgaaacacaacttgtcctagataggaatgtcaggaagccagcgagagaatgaagagtctgccgtccggggacacaatttctgtccactgtccctgcccacgtcccctcacagccctgcaaggtgggtggggacggctgatgatgccattttcagatgaggaaactgaggcacagagaggctccacagccaggactgggcgctcatccagttgactccagggcagatcctctcttcccagggcagccacccccgccttgtgagagccggtgcccgggggaggggaaggatggagacctgggcagttcacccaggcccaggagccagagccctggcaggttgtacgcagctgctcccaagaggcaccccttccacccctgcaccagccctgcctccacagaggcgcaaaggaagcaaaggcactgctggcgaagaaccttggcattccagccgcgcacagacacccagagaggaaacccgagcacccggaactggacggggtggcgggcaggggcagggcgagggccattgagttcagcgagaccctggcggccctcaaggaagacaggcaaatcagtgaagagcccctgtgctgcaagagggggcctgggctacccaggagcgcctaacctgaagttgggaaaggaaggcttcctggaggaggaggcggcggctcagagaggagtgactcgcctgaagccccgtgaacaatgcatggtggacggaagtacatggaatgccagagccaggctggtgactagtgctggtggtggggactggtcaaggcggccgccagggaagggatgtgaggacacggtctagactgatggaccagatggcgggggcaggcacagggggagggaggtttccaggacacccctcagtttctggcccaggtgaccaggtggaaggtcattccatctcctgagtgagggacacagcaggacagacaggcttggggagggactgttgggatgtctggagtctaggagaggatccaggcgggggatggaggggagggcggaatgagctcatggggcaagtggaaggcttgtgggcggtggaaaagctccagcccccggacacctagccaaggtcaagtaataacgacagtagacgttacatagccttgactctgtacagacctcatcctgcatccttacgttaactcattgaaccctcccaaccattatcaaattggaggtaccattatcacccccattttatagttggggaaactgaggcaagagacattaagtctgcaatattggaataggcaaatctgtagagaaaggaatgtgggtgagtggtgggctggggctgggggctgggaaggatcatggctaacgggcacaggctttcttttttgggtgatgaaaatattctaaaatgactgtgaaaatattgcacaactctgtgaacatgtgaaaacccactgaactgtatgctctaactgtatgaattgtatggtatttgaatttcacctcaat

SEQ ID NO: 439 - DNA, 448 bp, Homo sapiens
caccattttatatttgacaatgctttttgtatgattttgtaccaggaaatactttaccggctctcccagtgtttttttttcgtcgatttgggcacagagtttcctggttcacgtggatgtgaggatcctttactccagatcgccagccagtttttgttttttttttcctgcgttgctgagagtctgggtttattcatcacaccaggtggatcttaattccatatccctgaggccactgcaatgaggcagaggagtgtgctccctcatgagaaaggactggagaccgcccccagaagagaacgtatccatgtacggatttccaccaaaattgttagaaatgcttgtttcccagtgccataaagaaatttacttgaacataaatttaatttcctcagcaagggcatttttactttctgcagaaagggtacactcgccagctgttctgcca

SEQ ID NO: 440 - DNA, 1916 bp, Homo sapiens
gatgccctgcaatgcctcaggactctccagaatgttttcaccagcaaaaaggccctcagcagatgcagcctctcgaccttgaactttctagcctccaaaatggactatcggtactgaaacccagcaagctgaaatcagcaaaacaagatggtcttgctaacttgaggaagctgtagcagctggaagctccagagaggagggggctcagagtctgcacatcaatggggagacatcattctggctgcattatgaatggatggtttggaggaagaatgtggatagctaaacaagaaggagaatagaaagaaactactcttaagactattgcaatatccaggtgcaatgtgctttgtttctgactgcagactataatgtttattcctattgggggcagagcaagatttcagtttcttttctcagcaacaagaaaatactctgtctgaaatcaagcaacttctgggaagaccaagagtgatggaaactagagttacaaagcaaaaaccctacatcctgaatgcccagcccggtcaatgaaatttttctgtctcatttatcagctaacttggtcctcttcccctgggaacaaaactgagaagggttaagagataatgtggaaacaaactccccagcacttgcctaagagggcagctgtgtacccagaccttctttcctctatgtcattgtactagaaagagagagttccatactctttaatctgaatagttggcactcacttaaaaaagaatgcagcctgattcctctctgcccctctagctatttccagaaagttgttcatgggatgaattggtaagtaaagaattcagacactggttctgattaagggatcttataaatgatttataacctttgggaacatcaaagacagcactcataagccaggcaagctaaggggtgctcaggagtaaaatgcacctccccatctcacaaatccattgttttgatgaaaggataagaggcagttggcctgggaaggtgaaaaggcaggaaaagagtgggaagtcagctcctaggataataaccacatccacaggcattgtctcctttcacatatttacagcttttctttcttatctttccacacctctatattcagttatgtatgacctactagcaatttacagctgctttaaatgcatacatttcaggtagggtgtgttgacttatgcctgtaatcccagcgcttcgggaggctgaggtgggtggatcacttgaggtcaggagttcaagatcagcctggccaacatggcaaaaccccatctctactaaaaatacaaaaattagccagtcttggtggtgcacagctgtaatcccagctactcggggggctgaggcaggagaatggcttgaacccaggaggcagaggttgcagtgaggtgagatcacaccactgtactccagtctgggcaacagaaagagactccatctcaaacaaacaaacaaacaaataaataaataaatgcatacattgtatcagaaattatctcccatattgatgagtcttccatgggcatctaatttaaatatttttttctgaaaagcaaaaggtgctctattatgttgctggtgagagtgcaaaatggtatagcctctaaagagattaatgtaacaataactgttagaaccatatatgcaatcaccctttgacctagcaacctcacttctaggaattcatcttgaagacatatctctctatatgtaggcaaaatggaagctattcaatgttacattgttagtaatagcaagttactgtctatttttgtatctttcaaatacatgtctatttatgtgaaaggataaactgtggtttatccacaaaatgaatttttatgaagttgtaaaaaagaatgagtgacatgtccatgaactgtcatggagtgatttccagaacgtatttt

SEQ ID NO: 441 - DNA, 651 bp, Homo sapiens
cccggtttctgtttttctcccggtgcaggaaaacatgaagaacggggaaagtagctgccgcatgccaatgtgaaactccgaggagtctagccattctgatctggccttccaggtcattaggaggctctgccatcgtgtgaggaggtactgccaacaagaaggcccaatcaagatcctcccacaacaagagcagattgtgagcgtggcaagctctatgctgagcactggaaggacaaagagagattgggcacagacttctcactgatccaggtgatgaagagctcacatctgagaggatgtgaccatggatgacccaccagaatgtcatgggatccagctacagccaaggaagcacagagcaccgtgggagcgatttattgtgcttggggatggggaaggggacatgggaggagccatattgagaaagtagcatgggtacttggcttcacagagtgtggcagctttcatcaggaagtgatggtgggggaacagcgtctctggcggagggaagcagcaggtgcagaggtgcagaggtgtgaggagtctgtcacattctgggaagggagtatggttgggtgacaatgcaagacagagaaagcaaggagggaaggaggggcctagcctgaggaataaagaataataaaagcagga

SEQ ID NO: 442 - DNA, 550 bp, Homo sapiens; identical to SEQ ID NO: 83

SEQ ID NO: 443 - DNA, 583 bp, Homo sapiens
cggggtgaaaggttgagagaaagaactgagtccagttcagaccgaggagcctgtgacacagtcaacaccaatgccaaggagccagtggatacaggggttgaggttgcagacataaacacaggattcatcagcatatgtgtggtttctgaacctatgggacaggatggcatcactcagggaaagagcacagagtcagaagaaaatatgacccaagaccaggccttgaagaactccgatatttaatgtttgggtagaagaaaaggcaaacgaaagtatctgaaaagatgggccagagaagagagaatcaaccaaggggagatggtcccagaagtcaaacagaagggagtgattcgctgtgatgaatgctgcagaggccaaataagagggtgatggtggtggtgttcatttgattcacttcagttcaaggaacaagaaagcactcatttcccaggagaatcaccgtggtctaccccatctctgaacccaggcgaaagggtttcctcattgcaagtgagatacagccaaagcagtagtaaagcgaacaccgttttatagctgctatggaaaaattattatattttcg

SEQ ID NO: 444 - DNA, 1668 bp, Homo sapiens
aattgtgctgagaaacaaaggagagtggatgaagaacacagcagcctgcctccacagctttggaatcgatgtgcaaataatttccttgggaggaactctttatatacaagaggattcactccaaattgtacaccacactcaggcatgggactaagataatgaaagagaggcacctgactcaagcaatggatgtcggagcagaagactagaaggcaaagcaagtacatgctacctgtctgggcaagacctttcagtgcctttccatatttcaatgggtagtcatctgcacaccttccagtcttttcttctgtattgcaaaggctagaagccttggtactatatttatcaaacttactttttttttttttaacaaatcttcaatgtgattctcattttgctaagatacatttgtatgaaattttgagatagaaaagtatgaataagaaagcattgccttctttctcagtggcagcacacaaacatatggacttcacagacacgacattttgcagcaacttctagatcttccccctgtgagtgccctgggacatcattacaataaataaaccattcaggaagtcaaaggatggtagttttcacagaagcattgcaagcattgagaagaaaaataatccatatctagtaggtttatttttatgaggataaatctctggcctctccatatggaaaaggatctcctgtaagttaatcctgccatcaggttgctggctggtttgcctgggatataaagccctattagtgagccagtggtgacctttgctgctgtctggttagatgcgcagcagcactgcagtcaccctttctgagggaaagttcacgttttgaagcctaggtagaaattctctctgtaccaccatggtttcactgaatgtgagtcaattgaggcatcaccagggtggcaaaaagttatcaagtcaagcccagtcaactcagaaaattcatctcagaattccattttacgtcaatttcctggcataatgttgaaacactctgccctttagtatctggaacaatgtctaacacaataatgcttaacgccggggaaatgagggcataggtctgaatctccggagattccttttatggggaatatcttttaacaccccttaggaaacaacatcaactcactaaagacagtaccaataaggtctcctgccttccccaggaataaagatttaaatcacaccagctcaatgctggttgagggcaagggaacaatgaatggcttgtggaaggggaaagttaaaaatgcaaattacaactttgtgccccatttaaggaaagagaacttgaatagctatgcatatttgtgttttcttccttgctttgttatgtacatatttgtatatatcagccactaacttcttatctttccttcattcttcacttactaatttacataaggtactggtagttcatataaattcatttttagagactaaatataaaagcagaattgcaactgaacttaagcaagaatcattatcacccagggctagatttggtgactaatagaagtttggatctctatttttagaggagggattgagaaaatttttgtatggggaataattctattctattagcaagaatcgtgttgttttttgccattgctgctaattaaaattttaaatattgtcaaaagtg

SEQ ID NO: 445 - DNA, 3285 bp, Homo sapiens
caccgttcccgggacggggaagaggaggttcacatttcactcctggaaggagaaaatggaaaatgttctaccgggaggcacgaatcactctggcacatgcggtggtagctgcagcaggaacgaattcagcccatgacatttgagtagattgctggtgagacagcagccactgctcccaggcccgacaacaggggcagcaccaaagctggtcagtgtttcctccttacaggtctgaaggtgctgcagaggagggtgcttcccagagatcacccctgtgacagacagatcgattgaaggacccctgaatggctgaattgagaagaacaagcatattaggaggccatacaatgggagcctctcaggcagacagacaaagccgtggaaactgcagacttatttgtatgttctggtaaacacctttgcttcattttccccgtctccgcctggactgagggtcacctcacctctcctggtgtccagagcctccttcaggacagatgttgcaaacctgagttctcacaaacagcggggtccagcccttctcaacactggaaagcccttgagccatctttgatttgtgtgttttgatctaattgcactactgcttgcaatgcttgtttttagcggtgagtgctggtttaatttgtttctttctggtctcccagccccactccagaattttggctcctggagaggaggggccctgaactggcattttcagtgaagcatcccagtgccttgaatccagtaagcagccaggtgtctgttggcttcatggtttaacaacctaccatttgaagaatcgcagagatgaattaaaaagagccccggagaggctccccgatccagttgcacttcctgcttaagcaaagtaaagaaaaacaggaatgaaaacataacccaatgggttagttccatgctggccattgatgaggttgcagccaccatcagaagaaggccaaacggttagaaagacacggcggtgaggaagatgagcctcattatcgactgtcacctgcagccctgcacaggtgctcagaatctaacacttgatggctggttgagattcccggagtcctaattaggaatgaggagtcaggctggcaggacccagggaaagcaaaaagagaaggcagagaagctccaagtctgcctgtcttcgtgatccagaacacgtagtcctgctgcacaagtaactcacaatcttcctgtgtccagctgtcattagacccttggctgatagaaaaatgcaagttagcacactgcagcctcggtgtcgtcagtactgcacgtcactctctccagcacaccgcggcctcggcgtcatcagcactgcacgtcgctctctccagcacaccgcggcctcggcgtcgtcagcactgcacgtcgctctctccagcacaccgcggcctcagcgtcatcagcactgcacgtcgctctctccagcacaccgcggcctcggcgtcgtcagcactgcacgtcgctctctccagcacaccgcggcctcggtgttgtcagtactgcacgtcgctctctccagcacacagcacaagcaccatcctatcaagtccccagcaagcctttgtctccttgcagtcagctcctctcttgctggcctgcctgttgcctccttgctgtgtattttcctactttctctaatttgccttttttttttatttttgagatgaaattttgcctcagcctcccaagtagctgggactacaggtgcgtttcaccacgtccatctaatttttgtatttttcgtagagacgggttttcaccatgttggccaggatggccttacctcaaggacctcctgatccgcctgcctcggcctcccaaagtgttgggattacaggcatgagccactgcacctggcctaaatctgcctttcttaacctacaattgtctttaccctgagccgctggccccagatagtcgctgctcacccatgacaatatttcaccactgagatcatttatcctcaaaaaaatgagtagaatggccacggaattgtgtgcaaagaatgaaggagcaaaacagtcttggagtcttaggagcaaaacatctgcattactaatatcctcccaagtccaccaagcctcagctaggaacggttccccacttgtgaagtgtctgataagttctagtttccttccttcctttcttccttccttccttcctctctctcttctttctttctctttctctctttcttttctttctctttacctttctttctttcctttctttctatctttcttctctcaatctttctttctctctctctctttttgacagtctcactctgttgttcaggctggagtacagtggcacaatctcagctcactgcaacctctgcgtcccaggttcaagcaattctcctgcctcagcctcctgagtagctgggattacaggctctcgccactacatccagctgatttttgtatttttagtagaggtgggggtttccccaagttggccaggctggtctcgaactcctgacctcaggtaatccgcccacctcagcctcccaaagtgcttggattacaagcgtggaccaccacacctggctcattgattcatttattcatctgataggtatttattgaacataaagtgccacagaccgggtggcttaaatgacagagatttattttctaacagttctggaagccggaagtctgagatcaaggtgccggcaggactgcttcctccaagccctctctttttggcttgtaagagctgtcttctctctgtgtcctcacaaggtcgccctccgtgcgtgtctgtgtcctcatctcctcttattacggagacaccagtcctactggattagctcccatgctggtgacctcattctaccttaattacctccataaatgccctatctccaaacacagtcacattatgacatcctgggggttggacttcgacgtgtgagtttggggggatgcaacccagcccacaataaacagcaaatacgattagagcttctcacagatacaaagccattgtcgtgcagctcatgccctcctcgggggaagaagccagtaagtcacagagatcagtaacgcaggtggggacgaaggtgtagaggagagccaggcacggaggcctgttggagtgcgggtgctttgcaattttagaagccgaggtctaggggaggccggacttgaaagacgacgtctgggccaagtgcagagaaaggtggcggatgagctggaaggaagcctgggagaaggcactttgggcgtagggttttgagacacagctgtgttttgc

SEQ ID NO: 446 - DNA, 2591 bp, Homo sapiens
cctcctcctggaacatccaagggcactggatcctctgtgtccctctgagatggggtgccactccagcaagagcaccacggtggcagctgagtcccagaagcttgaagaagagcgcgagggaagagagccaggtctggagaccggcacccaggcagcagactgcaaggatgccccgctgaaggatggaacccctgagccaaagagctgaaatgcctctctccagagtcggaccctcacctccttcctggaactgcctttggccccagaaccatgagacaatccccaccctgagaagctccgatcactgggaggagagagaaagcctccagctttgggattcaggcttcagaagtttttagcagcctttgctcattggagaggtggggaggataagtctataaggaatcctatttccccagctctcccacagagaggacaaaagaagtcttcacacgttgtggaactttcctgcaacttctggatgcagacaagcctcagagcagactgttctggctccagtgaatatcggctgccaagctgtgagcatccagggatccccgtctgcctggctttcctgaagtcagaaggcgccttggtcatactgtgtggggtgtgtggatctcagtttgctctctttctttctccttttttcaacagctggcggagtagccaacacccctgacagcaatgtgttgcacttggctcactccacaccctatgaataattttaatatttaacttgaaatgttgttaagaaactatggaaaatatcaggatcccactgggatcccgtaaattgaaggcaacaaggtcttggtcctccagtaaggggggcatggagccctggtgggaaggaaagaagagaaatttgtgttcctgattccttaatccccaagaaaggtccctctgctaacattcacatatctcttcctagccaaagtctgtccatttcaaccctctagcatctgagctatctgcatccagctttcaaaaatatttcgctgtttactaacatgtctgtcagcctctcttttctcccccgcatgtgttttgtttttaaatccactcaaaagcgttttcatttgaaatcaaatagacatgtttgcaaataaatgttgacacaacacatttgaaagacagaattggggatctgagattaagagtatcagcagagaagagtgggtgtaattctgtggaacaggagtgagaacagaggcgagggagccgttgctttgtgccaggcgccatgctgaggactttccatagacggtttaatgccacccaactactcccattttatagatgaggaaatggaggaaataaagtcacttgcctgagtttgggcagccaggaaggagcagaacccacagttgagccccagcagtttggcttgggaaacgcatgtagagtgcttcttaaagcagagagcctttctcatgattaaactgaaatactagtccctttatagcctgtgcatagtgaggaccatttttctttattcactgagacctacctgcctattgagaagtatgtaaccggtcagcttggagttgccccactgcaggttgggtgatgcattgagggactttttatttttactctggtggtgggggacggggagggaggaagagacggagagggaagtgggagaagggagggagggaagggaggaaagatgaagaaagggaggagggagaggaggggggaagggagagaaagaggaaagaggtagggagagggagaagaggagggaggagagagggcaagaagaaaaaggaggaggggaaacagaggaagagagggaggagggaaagaaggagagggagagaaagggaagaggtagggagatgaaagagcggggagaggcagaatgggagagggagagaaggagaggggagacggagggaggaagggagagaaaggagaggggtgagggaaaaggggtagggaggagggaggaagagaaaaatggggagagggtgggcgagaaggaaaggaagaaatcgaggaagttggaggaatgagggatgaggcagggagggagaaagggagggcgaagcagtaaggtgctgcaaaggacccttctttttggccataaaaacctgagaaactgattgagattcttttgagcaataaggcaactgcggtgaggaaaaaataaggaaggaggcacaaaaagcaaagcagttcagcctgaaattgactacagagcttccctttgcttcagcagagcctggaggagcaggagggatgggggccctgtcagctggcccaaagccctgccctgtcccaggggtgctaagcttgctgcaggccaggaaacaggcctgggcttgcagctggggatcaggaagtttggggcctctttgcacagcttactggggataggccaagctctgggaactcctttcaattttttttttttttaagacaactctgtttttctccctcctccctactagtggaaatttaccttgcaaaacaggactgtgcatggtgagagctgcttgcaatgtccacactcaggactctatggaaagagttcgcagctggtggtgaggctttgagaattaataaaattgtaggatttg

SEQ ID NO: 447 - DNA, 249 bp, Homo sapiens
ccaactcactggagttgaccatcaaaactcttttccaggcacactcaggcatcgcagaaaataatatgtattgtggaatccctcacttgatgaataatctagatgatcagaaatgtggcactattttggctttcaggtggaaaagcaccctgaatccagcttcctgctatgaatgaatactgagcttgggttggtggaaattgattttcgagataagtggtgtcacctttcttcaaagcaatgcggctg

SEQ ID NO: 448 - DNA, 3458 bp, Homo sapiens
agccgcgtcccatctgtgcgggaccccactggaaatcggactgttcaactcacctggcagccactcccagagcccctggaactctggcctaaggctctctgactccttcccagatcttcttggcttagcggctgaagactgacactgcccgatcacctcggaagccccctagaccatcacggatgctgagcttcgggtaactcgcacagtggaagacctgttccttctacccaagaaagaacagttaatgaagccacatgagcatccctccctgccaacaggtgtacaccttagagaagagacagacaagtatatgacgtaatcggataaatgtctcgacaatctattacagcagctcaacaaagggccacctaattgaacctggaagtatcaggaaggcttcctggaaaacgtgatagctaagtggagtttttaacaatagtagtaataataacaaccttgttattctaaatggttcatatttattttttaataaaaaatatttcatattttttatttatgaataaatatttaatatttgcagcagccccatgatcaatgtactattattatccattttacagataagcaggtggaggtaaaaaggggttaagttacttgcccaagtcagtacagacagagagtgaaagggtcaggatataaatctagtctagcctgaatccatagcccatttttaaccacccactatgctaaaatcttttctatttcaagcagaggaaagaaggtgttcaatgtgctgagatatgagaaaacaccaagcattcagggacctgcaagcaggtcaataaagttaaagcatagtgtatgagtaatgagtgccaaaaataagtgtaactttatcagtaagaattgcaggcactgttggttataacttttgattcacgtacactgctcagaaagacaaagttgtgctgcaataacaacacaacttcaaaatttcagtggcttaaaacaacaaatgtttatttcttgctcatatgacacatccaatatggaaagttctgctcatgagacccacttagaaaccaaggctaatgtgggccatatcttaactcttggcttccaggattgttctggcaggaaaagagagaattgcggaatcaagcacccgcagttaaatgctttggcccagaagtgatgtgtgtcacatttcattgtccaatgctagttacatgatgatacctaacttcaagagggcagggaagtacaatccctgtacttgtactttgaatctgagcagtacttgagatcagtaactgcataccataagttattgtcttcagtattgaaaagtaataccatgcagcacataaaaatacgatttgggccgggcgtggtggctcacgcctgtaatcccagcactttgggaggccgaggcgggtggatcatgaggtcaggagatcgagaccatcctggctaacacagtgaaaccccgtctctactaaaaatacaaaaaattagccgggagcggtggcgggctcctgtagtcccagctacttgagaggctgaggcaggagaatggcgtgaacccaggaggcggagcttgcagtgagccgagatcgcgccactgtactccagcctgggcgacagagccagacgctgtctcaaaaaaaaaaaaaaaaaaaaaaaaatacgatttgaagtcagacacaatgaggtgagaatcccaacttcacaactcattagtctgcgtgattctgattatggttcttagccctcaaaattgcagtttctttttcttaaatatagagacattccctttcgagattgctgtgaggtttaaatgagattatgtctaaaagcttagtgcttatgacaaagtagaagtccaataaatggtggctttatttggaattgatcaagaatttgcaatttagtaaaagtcaagagcagactacaaaaaggattgtagttgattggaatcatcaccataggttatataacaaaatattcagtgaagaagcaggaaattatagttaatgtgcaataaaccagggattctcttcctagtttctcatttatattagccttttaaagctgcctaacaaattaccataaacatactggcttaaaacaattcctgtgtattagcttacagttttgtagggtggaagtccaagcagggctcagttttctgatcagtttctcacaggctgaaatcaaagtgttgaccgggctgcattctcatctggagctgggttcttcttccagtgttatgtcctcactgcagaattcagctccttccagtatgtgattgacgtgcccgttccttgctggctattggtcaggagctgctctcagcagctagagttcatccacagttccttgccacatggcccccaaagacaatcacaatatggttgtttgctttcttccaagccaggaggtattccttctctcagactacatcctctatgaatagccctagaaaacactctaagcttttaaagagatcacctgattagctcaggctcttttttaaaaaatataacaattactggagtgaaatttcatagtattcagaagttccacccacattaaactggaggatcatatgatggagagaatcattggcaatcatctgagaagtctgtctaccacatctcttcacagcttttccatgctgaaggcaacaatgtattttatgacaaacaatgattcacagaggtagtgcataggaggcatctgtggtatttaacacacaattcttaatcccaactagcctagaattcctaggactgggaaacccactccttagggaaatcatcacatatttgttggaaggcaattctccacatgtctctcatttctgcaccttataagcataggtacctactgctttgttccatttctgcaccttataagtagaggtaccctttgttctagactatcttttcaaggacaattgtagcacacacaaccttgaaagacagatactgtgtcttcctccagagcaaagaacaaatttgattactagtctgtataataattatacctctttccaaagcaaagggcaagcatacttcctgccattataaaagattcagatttcccgagtcaggattcctctcctggaataaagctcactgtgaataagacatctacctgggtccattcacttcatccctatggaacatggaagcaaggggaaactgaccaaacatggtgagagactggctactattattgctatgagtaatgaactatcctttgtcttggatccaggagtttcatgtcttccaccagcatccataaaactgtgacaaactaacaagcttacttaatctacttccttagcttgcaagtagacttaaaatcttagaactttcatagttcttgacaatattcaaggtattaaaagagagactagaaggactgcatggtggaaaaaaaatgtactcagaagaaaaaagctaactgcgttcatttgtaaagaa

SEQ ID NO: 449 - DNA, 2825 bp, Homo sapiens
acttcttccttgtcgtgttacaatttctgttgactcatcccagctcaggggatgcagagccgcaggagtacacaaaatgataaggttttcctttcaatttaaaagtcatgtttgaagcatttcattaagaaattgtagagaaaaactcatctctcattaaacatgataggaaaggcttcagacatactttttccattcatcttctcattatgggaaatgctgctgcctgtgtcactcaggtataaactaaaaggtcagttctttagcaaggaggctttgtaatctgttagaaaacacggtgacaacacccccagtgcatcctcctgattgtcgcttcagttggcccatgacttctctctccctgctccatacaatgcagttgcatttttgaggaaaaaagtttctcttttttctcactgtttagattctcctaagcttaatatttttaaaacgttagctccatctcacccctaatccaagagatcctcatctacgtcccagagtacaggttgatgatgattcccagtatcatctccaagcacatcacctccagaaacttttctcaaatgttcctttgacccctccctacaggccatcaaggcccactgctcctgcctctggatgttttaacccccaacttgtctataacactcactttctatgacagtatattatgggcatatgcatgtgcagacgagtaaaggtggatgcaggtaggcacaggtgagtgaaggtgagcgcaggtaggcacaggtgagtgaaggtgggcgcaggtaggcacaggtgactgaaggtgggtgcaggtaggtacaggtgagtgaaggtgggtgcaggtaggcacaggtgactgaaggtgggtgcaggtaggtacaggtgagtgaaggtgggtgcaggtaggttcaggtgagtgaaggtaggcgcaggtaggtgcaggtgagtgcaggtaggcacaggtgagtgaaggtgggcgcaggtaggcacaggtgagtgaaggtgggtgcaggtaggcacaggtgagtgaaggtgggtgcaggtaggtacaggtgagtgaaggtgggtgcaggtaggttcaggtgagtgaaagtaggcacaggtaggcgcaggtgagtgaaggtaagtgcaggtaggcacaggtgagtgaaggtgggcgcaggtaggcacaggtgagtgaaggtgggcacaggtaggcacaggtgagtgaaggtcggtgcaggtaggtacaggtgagtgaaggtgggcacaggtaggcacaggtgagtgaaggtgggtgcgggtaggcacaggtgagtgaaggtgggtgcaggtaggtaaaagtgagtgaaggtgggcgcaggtaggcacaggtgagtgaaggtgggcgcaggtaggcacaggtgagtgaaggtgggtgcgggtaggtacaggtgagtgaaggtaggtgcaggtaggcacaggtgagtgaaggtgggtgcaggtaggtataggtgagtgaaggtgggtgcaggtaggtataggtgagtgaaggtgggcacaggtaggtacaggtgagtgaaggtaggtgcaggtaggcacaggtgagtgaaggtgggtgcaggtaggtgcaggtgagtgaaggtgggtgcagtaggtactggtgagcaagggtggacacaggtaggtactggtgaatgagggtgggtgcaggtaggttcaggtgagtgaaggtgggtgcaggtacatactggtgagtgaaggtgggtgcaggtaggttcaggtgagtgaaggtgggtgcaggtagatactggtgagtgagggggggtgcaggtaggttcaggtgagtgagggtgggtgcaggtaggtactggtgagtgagggtgggtgcaggtaggtgcaggtgagtgaaggtgggtgcaagtaggtgcaggtgagtgaggtaggtgcaggtggtagagaagggtcctgcctcagaatgcctatccattcattccataaatgaccacttcttgagtgctatttgttaaaactttcccaagaccccaggacactgctaaataatctatacaggaagtctgatcttggaaagcttacaaactatccgaaggggtaggcattaaatcaagtgctcaatttattagctatttgcagtggttaaaagtgcctcaaggaagaaaaacaaaattcttgaaaatgtttcaaaaccaaacctgaccaaatctcaggacaagggtcaagggaggctctctgaggacatatcagaggagtgggtgttggatggtcaaggaaaagaaaagaatgtcagaacagcatgtacacggccccgaagcagcatggagatgggttcttttctgcaaaactttcaaaaccagcactgctgaaccaataagaaagtgagtctggtagaggctacacagaggttctaaatccatgcaacctacgtgttcatccatcaacgagtaagtggataaagaaaataccgtccatatacacaatggagtactattcagccataaaaaagaatgagatccagtcatctgcaacaacatggatggaactgaagatcactaagttacataaaccaggcacagaaagacaaacatcacatgttctcacttatctgtgggatccaaaagtcaatacaattgaactcatggacatatagagtagaaggatggttaccagaggctgggaagggaggtagggagctgtgggggaggtggagatggttaatgggcacaaaaaatagttagaaagaattaataagatgtactatttgatagcacaacagactacagtcaataataactgtacattttaaaataaatagtataatcggattgtttgcaactcaatggataaatgcttgggag

SEQ ID NO: 450 - DNA, 645 bp, Homo sapiens
agtaccataaaaaagtatatcatagacatgtttgatccgagacggaaggttccagagtaagtgacaactaagcagagatcttaaagatgtgggaacacctacatgtctatgttcagaagctgccttgatgccacatgcgggaggctggaaacgctgaaggatgaccactgctcagcagcagtctaccagtgatggatgagagttggtgcacaaataccccagctcccttgcctctcagtttggataatcctgaaaagacccagcaagaaatgattccaagatcacctagctgatctcatgctctatctggatttgagtgaagatatacatattcaccaagtcttgactcagtcaccttttgtgcaggcccaatagaagcaaatgcaggtatgatctggagaagcatatcttgaatctcaaaaagtcaggacagacaacaccataagaaacagcagggggaaaagaaaaaagcagaatcaggctcagaactacagacaccttcagagggcagtgttccattttattgagggagatctgaagagatgaagtgacttgccagagcacaggtccagtaagtgtcaggtttcaagttctttgagttgagattcagtcatttgaaagccatttatctagtggaataacacc

SEQ ID NO: 451 - DNA, 886 bp, Homo sapiens
tcacattgagtaggctgaggaggaagaggaagaggaggggttggtcttgctgtctcaagagtagcagaagcagaagaaaatccaagttggtcaaaggaagaggaggatcaatggccttttttcctccccccaacctttttttttttttttttttttaaacaaagaagcaaagtgagaacattaagcccgaaagagaactgtgttcattgcaggactttttgaggtctggttaagccatttatataaagaaattacacagttcctctttggtaacctcaatcctgaaagttagtgtgacaggcctacagctttttgttctcttcatcactccagaagttgcagactgcgctcagcaagacctcacaacatggaggaaaattaaagagataagtggtccatggagtatccccttaccccaccataaattggcataattttgtgcacaatccagggagaagaaaaagaagaccagaagcttgcaaaccattcgagagaaggaagggagctttgtcatgttgccatctgagggaccatttcagtagagccttttaagacacatgttttggaatacagtcaaatgcgtgctgctgtatgaccagcctatttgaactacttaagcatcaactaattaatctgcaagtgaagaatacttccagcattactctataattagacaatctcaggaggaaacaagaggatttcaaaggggagtcagatggtttcgcagaccgctacatcatttattttttcatcactcagattatgcctccaaatcctacagaagtataacaaccatagaacagacaaacaccaacagcatcaacaacagagaaactcagtccaggaggatatgaaaccctttgtaataaagaaagcaacatccatg

SEQ ID NO: 452 - DNA, 1872 bp, Homo sapiens
ccagggatgctgagagagcctttgacaaaatccagtaccccttcatgaagcaaacaaaaatcaactacaacagaacaaaaaccctcaagaacataggaactgagcccctggcccacagcctggtaccctggagctccataaatacctgttgagtgaatgagaggatgaaggcttctgcagagagagagtggaagaaaagtggcgtcttttgacttcggacttggctttccttgcagaggcctcagggaggaacaacacggaaacaaagatggccttgtcctgggcccttccctccctgccccactgtcctcctctgcatcctacagcagcctggggggaggtggaaatgggcccctttgttctgcttccagaattccactcccactgggtggaggcctggctgcagccccctccttcctctgccagttcttcctaatcctgagcgactcgccaaagccttggatcttcacaccgtgggtctcgctgtgaggacgggcctaagctcacaggtagcctcagagacagatacgggtgcagagggaagagggggtccccacctgttacctcccagtcctcttcatcagtgtccccaggacctatcacacaggacaaatgaaactgggagacgccgtctagagtgggaacccaggtgaacactaatccagtgtgggctgcagacctgtttttccctggtccctgacatgagtaaattcagaaaatgagggtaagtgctttgagatgttaacatgatagagtactttacttttatgactattgaatcaaataacttttcaagggttttaatggattatcagaccatggaaagatacaggaaacttgaatgcatattactaagtgaaagaagtcagtctgaaaaggctgtatagtatctgattccaactgtgtgacattctggagaaagcaaaactatggagactgtcaaaggaccagtggttgtcaggagttaggggagagaggcatgactgggtagagcacagaggattttagggcagtggaactactctgtatactactacagtggtggatacaggtcatcatgcattgttcaaattcatggaatggacgacaccaaaggttaactccagccagaagtgctggtctcttacccctgccccattcttagcactgggcctcagtttcctttcctgcaaattgagggggtagcatgatctgacctacccaattagacagttcagcaaatgtctggttcttttgacaaatacaggcagcgtctggaaattaggggccatagactcctcctccaaacctcaccatcaagatgctccaatgaaagcaggtcttgggcaattctgccagccagccatgctcattggcaaggctgcacaaaacagtttgtaagcttggggaagtcctagctgtcctcagattctcagatacgtagcttgcttgaaaggttggggttctgaaggagcagcttgaatctcagtccatcctgtgacaatctcacaaagtggggaccagattctgatgcctcattgggacagaggcaacaatgactatgcagtgctcctagctggccacatgttgtgaacattatttacttcaccagtgaaaacttatttcaaacatcccttatgctaattaatcaaccctctggtataattttgataaccacatttgaaatgctttgttaaaaccactggactatggattcctaaggaactccaaaggcgaaacagctgccctcgctatatatgttcagttaacctatgagcatgtgtatcattattaatgcttaagtatttaaaagtatattactacccagatgaactaggaaggagataaatcacatgacttctgagttccctcccatgctaaatatatgtaaac

SEQ ID NO: 453 - DNA, 648 bp, Homo sapiens
gggaaaagggctgagggggtagaggtataaaaatcagatagctcagcacttcgctccaaaggagctgaaggagagaggattccactgcgtgtatgttttctctttcacgtctcacttttgttctctgccatcaggaaatgcagtagacatttgtcaccagcagctctttggagacttcaatgttccttcctcccaggatccgaaaggggacttcagacacggagaatctaagacaccaggagctcagaagaatggagtctcaagacatcaggcaaataccgaagagatcagagccaagttctaaagggcagccatttcccaaatgtcaaccaagagcgaagccaagagaattatgatttcctggctatacaatgacaggaaaagcttgatcaaagctggagtgcaagttaaaaagtgtaaggtactcaagtgctagggtctgtgtccaagcccaatcaattgatcattagttgtttttaacttcaacgtttcttttgcaacagcacctcttccttaaagtagcaatcttagcagactgccaccttacatgatgcatcttattctccaaggacaatgaagactgaactatcgcacattacctaagaaagatgggaattgacatgcacatcacaattgtatacacaacag

SEQ ID NO: 454 - DNA, 623 bp, Homo sapiens
tagaaggacccagggtacacagggtgggtggctattctccagaaatgtcagtttctgggcagggcttaggtgtctgcagtccctagtcccacccctggccttgcattccagctcagcgggtggaaggtataaatttcagctgctctcagccctgctgtgtttttccaaagccttccaacagcaacatgaagttggcagccttcctcctcctgtgatcctcatcatcttcagcctagaggtacaagagcttcaggctgcaggagaccggcttttgggggcccctttttacagatgagaaaagttccagaaagacccagagacataatcaggtacctgcgtcgagctctgcacaggtgactgggactgcaaccccggagaccactgtgtcagcaatgggtgtggccatgagtgtgttgcaggatgaagagttatcttaaggatcatctttccctaagatcgtcatcccttcctggagttcctatcttccaagatgtgactgtctggagttccttgactaggaagatggatgaaaacagcaagcctgtggatggagactacaggggatatgggaggcagggaagaggggttgtttcttttaataaatcatcattgttaaaagcact

SEQ ID NO: 455 - DNA, 434 bp, Homo sapiens
ccagaaggaagaatctgtgaacacatccgaacatcagaaggaacaaactctagacatgccgcctttaagaactgcaacactcactgcgagtgtccgcggcttcattcttgaagtcagtgagacgaagaacccaccaattccagacacattttggcgacctagatgggacaatcgcctatcaccgagtggtgagaccatcgcctatagctgagcggcgagacaatcacctatcgccaagcaacaagcagatgaatggtgaaacgatacagcagagaaagagagaagaggaacatttgaacgccgagaggagttcagccgagggtggtcggagaggtttggccacccagcaggaagattatcttcccgtgccatccccgcttccagctctgcatccatccttcagagaaccacctccaccactcaataaaaccctg

SEQ ID NO: 456 - DNA, 544 bp, Homo sapiens
aagaagtgcctttcacctctcatcatgattctgtggcctccccagccatgtggaacttttttctcttgctgctaccatgtaagaagtgcctttcacctcgtgccatgattatgagacttccccagccatgtggaactgttaagtccaattaaacatctttttcttcttagtcccaggttgttctcattcgtggctggatcacaccagcaagaaggattttaaaggacaactccttggggccgtccaacactgaaaccgcctgaccgctgctgtctttgtgcttgcagaaaatcacggtgggcacaaaattttggacacgatttcgagagcgtgagagctactgttcacgaatccagggccagcctcgtgtctgtcttcctttaaagcacctggcttggtacctaaaatgttccttttttttttttttttgaaattcaataacttcagaacaggcgttgatgtagacagatctccatctttttggttttttgagtgagtttttgctctgtaggctgaattctttggaatttagttctgaaatcac

SEQ ID NO: 457 - DNA, 1207 bp, Homo sapiens; identical to SEQ ID NO: 90

SEQ ID NO: 458 - DNA, 1856 bp, Homo sapiens; identical to SEQ ID NO: 93

SEQ ID NO: 459 - DNA, 1164 bp, Homo sapiens; identical to SEQ ID NO: 66

SEQ ID NO: 460 - DNA, 910 bp, Homo sapiens
gctttgtggcagggaagtgagcgcgttgcctctgatgactttcatttctctcagttacactgaggtgaggccaactgctctgtgtgtggaagccagagaagaaagcagcacagaacagatgcaaaccaaggaggctggaagataagagcagagccatcaggacacgagcccctcgcgggtatgaaacaggagtcgtgggagcaaattagtaggtgcactgcatggagggacggaaggggcagggaggagcatctgaatgtaagatttcagagaagctcattttgtcagcatttcagagcttcctgtgtgcagcatggatctaaagctggtggatgcaggggggtgaacaagacaacatcttcacttcctgcatgctgatggcagaagtgagacatcagcgaagaaacatcacgatcaccaaattacgatgaacaccatggaggaaacaaaggacactgtgacaccaaggaaggaagggaggttacttttcatagtggctgtaaatagaactgaaggctgaaaaacagctgttaaaatggcttgtttgtttgaagatgaatgagagtacacaataaaaggaaaaaaatttggacacagacacacacagagggatgaccacgtggagatgcagggagaggatagcagctacaggccagggcgagaggcctcagaggaaaccagtcctgctgactctttgaactcggacttccagcctccagaactgaaccactgtcttcctttatcccaggatgtctgcaaggaagaaaatgtcctttttctagcatttagaggccaccaacattgaataaccacactggggtagacacagcggcgaagagattcctgctgttcccatcacagcagccttggagatgagaagacagatggatctgaccagagtgagtcccag

SEQ ID NO: 461 - DNA, 749 bp, Homo sapiens
gtaatttctcccctagcaagaatgaggaagatgaagagctcgggtatctgagggctggtgtgtctgcatgcgtgtgtgttttgggggccgactgaaggaagagaaggctggagagagggaacatgggtctgagggcacatcgctaaggggtcaagaggcctaaaggaggagtctaaggctctccatcgaacttggacttggtctacattagactttaacctccatgaggcttggactttcaggcttcctccctcacaccgcgggcaggtgaggcgtctgctacaggcctggtctcgcagagggggcccagcgccccccgccgccgccttctcctggagtctgtgtgacagaatgggacctgtgggaaagcagcacgtcagcacccagccccgcttgcgcgccagcagctaattaaagccaggaaggtgatggcgattttcaactcattcccgttacaaacagccgaccttcctaccgagttcaagtaccttctgcctggcctggaagaacaatatctctctgtctccctcttccactggccctcacctgccttcccctgaacatgcattttgcctgacaggagacagaggcagttgagatggagtcttgctatatggcccagctggtaatgcctagattcttgagtccctccctggctcatccctgggagcagcactgaaccccttgtctgacacctgtctggaaatggagcctgcacattgaccctagccatgtgtggtcttgttact

SEQ ID NO: 462 - DNA, 2112 bp, Homo sapiens
cacggagcggcttgcacacatgcagctcttaggcccgggccgcacgtctcagaagccccgtgtgcgactttgaccgccgcacgatcctctgccgggggaggtgggcccgctgcgctttgggagcacccgcgcccgacactgaggtctcggtgctgtgttcggcctcttcgtccctgcgggtcccctctgggagcagaggcggtcggaaaaccctggggctgaagtgcaggcttcgggaggacgcgacctgccaagatcagctcccggcacgtgatgggagcctggctcaccttcccccagcgcacgatgggccgcagcctccccggtcggcctggcctgctggaaaggagcagctctgtttccagaggcttctggcgaagcccacggcctcccattgttggctgatttataaggaaagaggggaaaggccaagtgtggatgccattagcataacctaatccagaccccatgacaagtccaggatcctgcagggagagggcatccttgaacgtgaaggactggctttggaaacttggcctcccggaagaaaggtctccgggcccacccacacccaccttgtggacgcccccgcagtcgaatacactccacaggaagacggaccacaaacagcagcagcctccggtgtcggcccagtgatccgggagctcagagttggctctgcagaaacccatgaaagaggatcctgaaagagcaagggcggcctccaggtgaaggtggtgggcggcctccaggtgaaggcggcctccaggtgaaggtggtcagcaccctccctttggccaagaggagactgcagtttcaactcaaagattattcctgaatgatgcagcaagcttaaacttccttaaaaacaaacctctgggaagaggaaaacgaggcaagatgctgagaaaaagtcatctcccactctgcccttctctggcaaatcgaagtgtcctcttgtgggaggcggtgggcagcgacactcctgttggacgtcagtgctctcgggatgggcccggccaccccggagcagaactcacttagggcctggtgcccctgtgcccagttctcagaacgtcggagtgctcagttctcagaacgccggagtgccccattcataacctgcagccccgttcatagcctgcagctcccctccttcctctcctcccggtcgtcagggagcacccccagctcccctccccactctcaaaccctcctcctccctcccctctctcatttccctgtttgcaggatctcctcctgcccactctccagcccaggtcctcccctctcatctccaattctgcttcatgggccatgacagcaggcaggccatggcctgctctcagcagtttgatcgatggactaaggagatcactcctatgagagtgaaaaagtcaaatgtgcctgagattcggatggggagctctcaaagctacggattgcaagagtcaacaccgcctcaaaagtacaaggccggccgggtgcagtggctcacacctgtaatcccagcactttgggagactgaggcgggtggatcacctgaggtcaggagctcaagaccagcctgaccaacatggtgaaatcccgtctctattaaaaatacaaaaaagattagccgggtgtggtggtgcatgcttgtagtcccagctactcgggaggctgaggcagggggagcacttgaacccgggaggtggaggttgcagtgagccgagattgcaccattgcactccagcctgggcaacagagtgagaccctgcctcaaaaaaataaaaaaataaaagtacgaggcccggtttaaatgcaggaggaatctggtgagcgagtttcactctgatgcaacagaaaagccaagccaagccttggctgtgcctggtcttggccggggagccacaggcagggtctgctggtttcggtgtcaggggcacatccccaggaccacgtctgagatgggaagtgccttgatggaaaactgatacctttttctttccgagtaactttagaacatgtcgcttcaaatataactaatatcctgatttcagtggacttgcatggaaggaaacgcaagttcatttgccagtggggggtgaggactgggagagtggggagcag

SEQ ID NO: 463 - DNA, 1954 bp, Homo sapiens
acaaagccctgcagatctgctgcttttcctgattctcctgtcctgagtgagtgcaaggggctcccctgtcgtcgatgtgttctttgaagcagatgctgtgcctgatacctgctggagagtcccaccgccttgagtgagtcaacaaacctatcatccttcccatcttccaggatggatattggggtggggggaggttaaagggaataccataaagttgctaccatacggttagggctgaatacaatgggagtacttattgtgatgatgtcaatgatgatgacagtgatgatgatgatgatgatgatatctagaactccaggttttcctggagagaaccaaggaggattccccacttacctaataaataaatgtcctgtaaatgcagaacatgccatgtaattgatgacacaagcgggatctcacttctgggggatgagaatcaattctttatggattcccacagggcagagggacccgggtggagatactaagctgtctgttgtatttccgaacgaatgagtacgtacgtaacagttatcgtgtctccttgtaactcgtgtgctaatcataaaatcttcacaaggattcatgacattcgtgctatgactattctcattttacagtgaggaaggcgggacacctaggaattaagtaacttgccaacatagggacgagctcaccacacaacaaccaagggtggggataccagtcaggtactgcggaaaacactggacatgaggagagactgatcacctgcataatcactgctgaaaggtcatgtaaggtggagacagaaaagtatacatggatttggcaaaaaaaaggatttgctggggaagagggggtgaaactctgaattgagtgaggagagaaaggggaaagaaattgaagacagaacagacactgctttctagaaataaagctatagctggagggggaaatgaggtcaagagagatttccttatttgttaagatgggaaaaataatagcccatccgtgtacttgttgatagaaataatttggtagaaagagaaaaattgatgatgcaagagagaatgagaaggaatttggtggggtagaaagaaggctagaacctactgctcaaagagagggtttggctatggtgagggagaatctatctacatgacaggacattgaccaggcacggaggtatgctcttgtagttttcatactttgtaataaaagaaacatcaattttaaaaactcaacaacaaatagaacatgaaaatagtctgtctacttaaaaccttaaaacattacagatgaaactaaagtctcctttggtgatgttgtgggattttatttattttgatgtctgagaactattccattgtatggatataccataggttgttcatccattcacctgttgagggaaatttgttttgttttccacattggctgtgacaaacacaactgctgtaaacatttgtgtacatgtttttgtatggatgtaagtttttcttttgtctaaagtaaatagttaatttactgctgggtgatatggtaactgtatgcttacccttataagaaactgtcaaactttctccaaagtgaccatacaatccattttgcatttccgccagcaatgtatgcatgagagaccagttgatcctcatcctttcccctgctggtattgtcagtatttttagtttagctgctctaacatgtgagtcatggtgtctcctcatagctttaatttgcatgtccctaatgactaatgatgctgagcatctttccgtgtgctcattcttttctccacttcttaatcggattctttgttttcttactgttgagtttagagccacctttatacattctaggtacaaccttttagatcaaatatgtaatttgcaaatattttctcccagtctatatctggtcttttcatcctctttaacaatatattttgcagaataaaagtattttgatg

SEQ ID NO: 464 - DNA, 1956 bp, Homo sapiens
ggcgcgcaggcggcgcgggtgcgcggtgcggcgctggtatccagaggacgcggtcaccgcctctggcatttgtcgttctgcgcttctccgcaaggaccctctgttaggcaggcgcccaccgtaagcctcccgggccttgtgaacctgctctttggccttggatggaaagtggggaattgggtggggggctgcggaccccttaacgtggattacttggtgtgtatcagctgggctcagaagacccacgacctcttctccatccgtggattgatttgttctgcttaacagctgggtcgccaagctggaggtatttttccctctccaccctggtcttctcctgtaacgtgtggccgccttttccagcacggcctcctgccttcctggtgcactttttggagaacgtggtggaatcagaggtttctggctgactcggtgggtgctttgaaccaggaaaggacaagaaagaggatgggaaggactgatccacattcccaccaggaagtttagcagaacccccgcgtgccacctggaccccttggaaggacctggctcaggctggaccacctcttgagaggcaggagctctggatttgatcaagaattctttgctgagcatggtgcctcatgcctataatcccaacactttgggaggccagtgtgggaggatctcttgagcccaggagttcaagactagcctgggcaacacagagagaccccatctctaaaataataataataataaaataaaaaattagcagggcatggtggcatgtgcctgtagtcccagctacccaggaggctgaggcaagaggatggctggagcctgggatgttgaggctgcaatgaactgtgattaccccactgcactccagcctgggcaaaagagcgagagaccctgtctcaaataataataataataataatcttattttggagaataaagagacctctggatttgaggtgccatttgggtagaaagaaaagacgtttacaccgagaaatagtctgtgttgccctgaaggagcagagggatgcatcgctggaggtgacctacagttgaagaagactcattatgacagaccttgtccttcttccttgtggaaagtgtttcctctgctgctactgctcatgagactcttccccctccctgtcccagggaaccaaagggctttctaccacaccctttcttgccccccgcctcccatgtctgctgtgcctttgtactcagcaattcttgtttgctccattatcttccagccggatacagagtgaatagttaaccacacttaggtcaaataggatctaaatttttgttcctgctccgtgtaaagaggccagtgtttgtgtgttgcaagcagccttggaatagtaactcttctcatttgtttgggatctggccaccaagttccagaatgatacacggatcagtgcagaagttcatcaggctctcggaccttagggctgttggagaaggcttcagcagcagaactgatggtgaaggctcgtgttctccatcctcaactttctttgcttcgatcatacacaagaatacatttggaagggcaaaaaatgaacactgtcgttcattgcagccgtgttttgtgacacagatgcacagtctgctgtgaagaccttctctcaagtggcatttgggagtccatgccagatcatggtgcttcatgagagactgacagctatcaggggttgtggcacttagtgaggactctcctcccccagtgtgtgctgatgacacatacacacctgacaatagcttgagtcttctctgttccttttactctgtagccaacatacacatgatttaaaaccctttctaaatatctatcatggttcatccttgtccaaatgcagagtcagagctatttgtacttcattattatttccaaggcgaatagttggctttctttttgcaaaaataattaaagtttttgtatgttgc

SEQ ID NO: 465 - DNA, 340 bp, Homo sapiens
cccagatgaagcttgacaggagaactggacacaacaggccaggtttccctaggatcaccagctgtcatggactgatttgtgtctctccaaattcatatgttgaatacttaacctgccatgcgattgtgattggagataattcctttagggaagcaatgaaggttaaatgaggtcataggtgggagcttaatccaatgggactggggtccctacaagaagaggaagacaccagagctctctgtctccacacacagagaaaagaggctgtatgaggacacaagagaaggtaatagctgtctacaaaccaagaagagaagcctctccagaaaatgaaccctgc

SEQ ID NO: 466 - DNA, 658 bp, Homo sapiens; identical to SEQ ID NO: 186

SEQ ID NO: 467 - DNA, 613 bp, Homo sapiens
cctggaccgccccaagctgtcgcagacccgtcttaaacacaggaggcgctgttttcgtggaaatcccccggctgcgaacctgggatccctgacctggatcaagtctccgaagctggcagagtccattctgcatcaccggtcttgggctttgaagaagcctaggagaaattccgcttcggccatcacgctatgaaaagtggatttttttttcttaagtcaattttttttttttgaaaatatgagacttagtaggtttgggaagtgggctaaaagaacatttgatattgtaattgaccccccctttaaggtgacagtgtttttcccctacttaaagcgccaacttttttgtgcactataaaagctattactatccataaattgttactctcggtagaaaataacctagtcttgctcggtgttattgaagagccaagagggtattggagaatcacctccagaaggaacaaggaagctcattagcactgaaagtcccccggatcaggcccaggaagctaagcatccgtatactttacaaatggaactaaagtcagctactaatgggaactttgcacaaaagaattagtttctgacacacaattcgcagatacattta

SEQ ID NO: 468 - DNA, 430 bp, Homo sapiens
gggccagggatgtgagaaagaagcgagccctcgagtttcctcggggcatgtgggaaggtttttttcaggatccaggcagaaccttacagagctgggagttttttaactttccattcctggcagtgacgccaggagctttaagtgatggaaatatgcgagtcaatcagtggatggtgaacaaaggaacagtaaatggagtaacttggctagaatatggcagtaactacaaggcatgttctgctctggcacgaagacaacccacctgaggcaccagacacatgagtgaagccatcttggacatcccagtcacagccaaactcactcctgagtgcatctgcatgatgaacccagcaatccccaccatggagcaaaggatccatccagtcaacccaaagaatcgtgaaaaataataaattgttgttttaaagtt

SEQ ID NO: 469 - DNA, 1705 bp, Homo sapiens
cagggagctggttccaggaaagaagggcacatgagcaaacatgatggcccctttatgagaggtaatttactgaaatgcacagcgattacctgctcacccagccctgatgtaattaaaaatggcaggctaggggctctgtttcccccggctctggcagagaaacctgggtttcgacttgtgaagcttgaggttggatgtgggaattggcttggagtcataggcgatgagagggacattaggatattatgaagcccgtgaactcaactcctgagaaggacgcagcagagcgagagaaaagatggaataaaaaggcctacctcattgggctcgtgtgggtgaggagaactgaagagtctgagagcgcggcacgagccagaggctacggaaaacactgccctcctacactccaccttggagagacccagaaaagaacaagcttcatttgtaaaaaaggaaaacaactcaggcaatgggggtggcttaaaggcactctacagtgtgcagatgccttccacttcttccatctgccctgtctctccaagaacccctatggccccggtctcagaacagagctgagtgcagaaatgaaaatctatggctctgtgttccaaaacgatgaagaatttcaagatggtggcagtggtaaaatctttctccaggaaaaatctgtccttggcccaatgtgtaaacacttgctgagtattgtgaaaccagcaacttgttcacaattcttctgaatttcttgggaaatttgaagtggagtacctgtaccaacatgaaatgacacgaatttaagtgacgctcaacaacgaaaagcaaaaagaaccaaagaggaagcaactgaaacaacatctggatgtatttaaaaatatacaatgcctccaaaatcaggtgtcattaatgaaaattctgaagaaatgccaccggacatagccaacgcacctacgctgttgttattcatttcctgcttttcacagaaaacaattttgttgcatggaagatcgtgaacttcaaagggcagaggggaaactgtcccttggcctctacccctccaaggccccacttttttgtcaacactccttggacgcagcagaagtatgaacataatatggtcctgaatgaggctgagtctttgggcgcagaagacccgggttaataaaaataggaaggtaagaaaagaaaagaaaaatcaagacacatcataggactaaattcctattatttatccactcaggattgaccacccctttgggccagatagttgtacccccatgtaccaggtgggcacatgaagacacaagaagtgctgtgatggttcattttgcacgtcaccttgcgtggagtatgccaactcattgtttggtcaaacactagtctggacatggtggtaaaggtattttttagatgagattaacacttaaatcagtaaagcaggttacccaccatactacgggtgggccctgtccaatcagttgaaggcattaagaacaaagattgaggtttcctaaagaagatggaattctccttgagactacaacatagaaaccctatctgagtttccagcctgttgccctgtggaattcaaactcaggactccggtctatgacattaaccctcacttaacttttcagcctgccagcctgccctatggatttcggacttgccagccacacaattccttaaaataaatctctccgtctctgtc

SEQ ID NO: 470 - DNA, 1641 bp, Homo sapiens
attgcccacagccggatccacggtgactaatctccgggaaggcgtccagcgtgagccgtgaggcctgcacctgcgccggacttcaccactcaccaggagtctctgcccgccgcccccagcgcggttctcttccctgctagacgtaaagtcctggggacaagcacagcccagggcactttctggagagaagatttcgatggggaaagataagagagcatttggatatctacgcactgtcaacagaaatgaggcttcaggccaaggcttctaaaatgcaggattcccaaagtggcagtcacataagacgggtccctccatcgccttctagaatattgagaagatcatcacgcctgggactggctcacagcactgatctttttcttgttagcagagactccaggaagcagatgagcagacctatgggcctgctatgtgcaccgcggcccacactgccgcctgcctgggatcctgcatcacccgagtcttcctgcggaccaccctgggtggtgcacatgcggtcatcattgtgcaaaggaagctttagttctataatgaaagcccctttagtaagtgatgctccttgaagactcggtcagcgtctcgttcacctctttatccccagacttagcacaattccagccccaaatcggcaacggacctttgaccaagtgacatgtcagtgcttcagggagcttcactgatcaggacagaagtgagtgactggaggaaggtgacccggatgtctgtaacccccagaaagggtgagatggctgttttatcagccagcattgccgagttggtggtgtgacgacatcctgtctgactgctgggccttaccggtgtgttctctgctggagccgtgacagtttgagttgaggacattttacatcaatcactgaactgcacgaaagatggaaatccagcaagggaccccgtcggacctgattgaccgcagagctaccttttgctctttctggatgccacacggcctcctcctcccacctgtccttggagcttgtgttggtccactttcatgctgctgataaagccatacctgagactgggtaatttataaagaaaaagaggttgaatggactcacagttccacgtggctggggaggcctcacaatcacggcggaagttgaaaggcacgtcttacatggcggcaggcaagagagaatgagagccaagcaaagggggtttccccttatagaaccatcagatcagctgggcgcagtggctcactcctgtaatcccagcactttgggatgctgaggtgggaggatcacaaggtcaggagtttgagaccagcctgaccaatatggtgaaaccccatctctactaaaaatacaaaaattatctgggcatggtggtgggcacctgtagtcccagctactcgggaggctgaggcaggagaatcgcttgaacctgggaggcggaggttgcagtgagctgagattgtgccactgcactctagcctgggcaacaaagcgagacgctgtctcaaaaaaacaaaaacaaaaacaaaaaaaaccatcagatctcatgagacttattcactaccatgagaacagtatgggggaaaccaccctcatgattcaattatctcttgctgggtccctccctcaacacatgggaatt

SEQ ID NO: 471 - DNA, 815 bp, Homo sapiens
cgcagcttcccggatccgattctggcgcggcctgagctccacggcaggtggcccggccctgcagggaccccagcacctccgggggcctcgcgggaattgaggacgagcctctggcgttgggtgaacctgggcgtttggtcggcaacggcgcctgcctgtgggaggggcacccgagcagggaccgcctcgagtgcactggggcccagctagggcactctcgcgggacaatgggtgtcacggcagccagcgaccgtttgtcattcacagctgcctgaaaggaggaccgcagtattcccacgcaggaagcttggaccaaaagcaggaatgcttaagggcgcatatgacttgccatggtaaaaaacaggatgccaacccaggcctgatgacatccacctcactaaaagctaaggactaggactttctgctttaaacaaggacccacatgtgggtgttttctgtgggagagggagagaggacattcgaagggcagaagtctgacctttgcaagcacacgtgaaccacaccaatgagaaatgaatggacgagccagatgccaatttataaatttcctactgcacaccttgaatgtgaaagtacatgtggccgacaaagagaagggaagatggagccgccatcttcaacaggagtggcacaactgtcggatctatgtctgcagctggattttacaggctgctcttcgttagaaaggaaaactttacggaggacttccatgccttcactatctgcctaagtaaattcttcttaactcctgtaccagtctcagcctcattttgtccagcccctatacaagatgg

SEQ ID NO: 472 - DNA, 272 bp, Homo sapiens
gcccttctgagtattttgcttgatcaggaaaaaggcctgggaaagccaacaggattctcttcagaatgtagattttccccacaagagacagctttgcaagactacttcaagatatggcaaagaaacataatatggggtaaaacacttcaatttctttcagggcctgtgatctgtcatgtaatgctatactaaaatcaggctggaatttggtatcttattgttacaaagagtcttctttgtcagtcttaagacctgttttaatgttaatgctg

SEQ ID NO: 473 - DNA, 634 bp, Homo sapiens; identical to SEQ ID NO: 178

SEQ ID NO: 474 - DNA, 844 bp, Homo sapiens
ggcacctaggacagggacgtgagtgaaggtctgctggagcagagaaactgacactgacaagaagaacgagaatgagaaaccctgcgacgagtctgctgacagctaatataagtctgcaaaatcagctggaccaccaaacggcaattgagagctgcacaacctgcaattacctttattcaattaatgcaaaaacaaaaatggggagatgttacaggccgaaagaatgaaggtcgtgaccaactcagtataccactgaaggctatatgagcaaacagaaaactgttctcatgaaagcaggatgttggaaaactaacaactgtgtctgccgccagaagggttgctgagggcagtcatgccccaagcgcagtgttccttgtgattatctatagtaacatctgaagcctgttgtacaaaggaagcaattatgtgtacctgtgataaatcaagcagctgaccaactgttacctctccctccctgctctttctacctaataaatatgaagggctgtagaagctcagggcccttgcccactagaagcaaggagtcccctgaccccttcttccaaaaatactctttttgtctttgtcttcatttctgcattcgtcccccttcgttcactcccatagcaaccaacagcaacatgagccaccatcacacccggcaacattttcttaaaaattacattttactttgctttgtctcacattacacttatgtcaacatcttctcatctttccaaagagtttcactagtaactgcctgttgaaagctggcagtctcaaacttcaagcatgattctgtaagccaaagctgaattagaaaatacaaagcttaagaaaatct

SEQ ID NO: 475 - DNA, 569 bp, Homo sapiens
taactttattatcagtagtaactgtcagtttcaaccagcagcagttatcgctcccaccctttgagggtgggggccccgtggctaatgctgtctttaagaatacacatctgtgtacttcctgtttcttagctgagagaggaggcctcaacaatataaagcgcagggagctggggagcggcaagccagtgggaatgggcacctggccataagtcagagaaggggaaggagagttactttattctcttctggtgccagtaagaactttatcaaggtactagtgccatcagctcctgcccaagggcacccagggccccaggtcagcatgacggatttaagacacattacgttctgggaagacggctaggaagggagattggagacagacatggggagaaggccatgtgaagacggaggcaggaactcctgtgatgcggccacaagccacagagggcctggagccaccaggagctggaagaggcaggagggatcctcccctagcacctgtgaagggaacagggtcctgcccacacctttatttttgacttttggcctccagaattgtaacgaat

SEQ ID NO: 476 - DNA, 965 bp, Homo sapiens
ataagatgtgaaaaacaagacccagagaggggaaatcatttgaatcctgtcctggtattgctttgtgttcctggatttggagaatttctgggaacacaggaaaaggaaaggctcagctccagaagcagacccagaatggcatccttctctgagacccagaccccagccccttttcatggaagaccagcacaaaggaggaagtaggttagggaatggtaaggctccatgtgatgggactaatgtggagaggcctggggcctttccctgaggactggatggctggagtttgggagcctgagttgacagaggaggctaagcccgggcagctactttgttccagaaatctaaggtccctggagggaggctctgctttgggagggggaagggagctaacattgcagagcaccaactgtgaaccaggtacaatggcagagcctttccatacctgtactcacaactagcgggtgaggagtcaaggcaaataggtgtctcatagctccccatatctcggcagtcgaccacctcctcctttgattctctgatgtcactgccagttctcctcctattgctctgacctgtctttctctgtgtcctttgcaaactcattctcaactccttagactcagtcaagtcccccagttacacacttccatggtactatatatcattccttcagagcacttaacacagttatttcctatgtatttgtccagtcatttgaataatgatcctagtttcattggatggaaagttccacaaggtcagtgaccatttctatctgtgttcaccaatgtgttcccagtgcccagaaacaatgcctagcataaagcagctgttttgtaaatacttgttcaatgaatgaataaatgacaaaagaacatctctctggcctaaactcccttcttagccactccctcaccctgagctcacccaccccaatgtgtggaccagggaacaaagtacct

SEQ ID NO: 477 - DNA, 594 bp, Homo sapiens
cttcagcctcatctactgcacacttgagtccatgagattttagagtgccccgccacctgccttctacctggagccttccttccaggtccttcttcaacatcagctccaggatctgcaagatctttggatatggccgctgcagaaggaaggagaaccacttcctggagaagcaggagtgagccaggatctgccacacaagagagccgggaacccagggcatgggttaaggcgaggagcaggtccggagggaagatctgaggcaaagagagagcctgtcacctgtgctgccttgagatgctgacatctgaggatgccccagacagggcctgtggctgctttctgaaatagtgcagcaccttctctgcttcctcctcaaccttctccttcacagcagaaccctgcctccttcctctccccacaggcttgtttcagcattgatttgatcaactgagcaccacgagaacacaaaccacattcctttgttttttcatcacgttacccccagcacttaggacagtgcctggcacaaaggaggtagtctgtaaatatttgcgtaatgaatgaataaaggagggcatgagtacatctcctctg

SEQ ID NO: 478 - DNA, 594 bp, Homo sapiens; identical to SEQ ID NO: 477

SEQ ID NO: 479 - DNA, 2893 bp, Homo sapiens
ggtagagacgggatttcactatgttggccaggctggtctcgaactcccgaccgcaagtgatccacccgccttggcctcccaaagtgctgggattacaagcttgagccactgcacccagcctggaaagtatatttatgaaaggtttgcactccacaaaagcatctttgctagggtgtcaaggaagagatcactaaaccaaccccaacacatccatacaattccagcaatctagagagggctggtccttttccttttctggattattttctgttctcagtaaaacaagtatttactgtgatactgaaacactgggaaattaacactgattaagatattttaaacactgagtcttaattataacagaaccagttttcatcagaatgcttttacgtcacattcagtgaagtgttacgctaatatattctacagccctgaagatagaaaaaaggtttctctccaggtatgagatatggtacaaaaatacatttttccacatacaaaagagagaaaaaaacaaagacatgtggcgggtggcgaggggaggcccaatcccaacaccctacaaggttccatggaatggagaaggaacaaaaaaatccccaattattttggggtaagatgtgccccagaaaaggtgaaatctatgcaataaaacccaggttttcttcaaatctagcatctaggatttctatcagagtttcaaataatcagaatttctatcagaatttctaccctgaggtgacacctactaactgtaggttctttcattaaaaatgaagacatctttcaccagaatgtatcaagctataaaactggcttcagagcctacacttagccagagtggaaaaaaaaaatagtgcatattttcgacagcaattttgaattgatgcttgaggtctcaatccaccagcacccagatatcatgttacctccctcagttgaatacaagttaaaatgatgatcttatcgagatctcaatagagcacagtgcccttcatgtttcgggtaagagggtgggaggaggaatgaagcgggtattacacccagcccagtgacagcttaagccttaacatgcgggcatcttacaatgaccataaacaagggaggggccaaggcagggctggcgatcattagctttgcgcacagaatgccatgttttcccctggccaacataagcaaagctgttttagtacctaaacgtggtatagccaaatgcacaaaaggaaagaagatagagatgacctcccgagttatttataccttgtgctaaaatagattcatctacaagtatctaaatgacaaaactagaatgatttcaacccagtaatcctgtgttccaatgtgcatggataaagatttgatctaggcccagcgcggtggctcacgcctgtaatcccagcactttgggattataggggtgagccaccctgcccagcctgctccagcaaatcttaaatatccatgcacactgaataaacatgcacctgaaacaggtgcacgtttcaggaagtgaatggaactctccaggagagtttgggtcccatcatgtgtaccttagaaacagaagtctcaaaagtctcaacaacatccacaaaaacatctgcatctgttttccagatacttgcaaccaaaaataaaacttcacaggaacactacacaagaagtggtagacagctaaatcttctccaaactgagacctggaccataaggtcttggttgtagcaggtctggcaggggttatctataaacctgcacgcagggcactgtgagcgggttgccagggtacatctgtggccaggtaagggccacagagacagtcgtgatccccagcagcttcaaagctgcaaaatgctgggcttttttttttttttttaagatgaagtcttgctctgttgcctaggctggagtgcagtggcgtgatctcggctcaccgcaacctccacctcccaggttcaagcaattctcctgcctcagcctcctgagtagctggactacaggcacccaccaccatgcctgactaatttttgtatttttagtagagacgggggtttcaccatgttggccaggctggtcttgaactcctgacctcaggtgatccatactcctcggcctcccaaagcgctgggattacaggcatcagccactgcgcctggcctagggctttcttttttaaaaaacaagtcctaacaaaagggggtttctaccagcccctgagccacaccttctgaaactcccttgcccaggatccccacagctgtccacctcgcaagtcccactctctgcccacagagactgcctaaaaggaggacacaacagatttcagataaaaagcacctgtgtatcgtaaatatttcaggaaaaagaattcagatcttttcaaaggcttgcttattgctgctaattgttcctgaggatctttctaagcagcaatatacttgagaatattagctgctactgtttgttttccctctaaggtcctgaggaaatcaaaagaaaaaaaaaaaaaccctcaagggtatagcttttgtatatagccctagtgagcaaactgcaaattgggacatgcagtagattctggagcaatctccaatccttaccaggtacttcctggcatcaaatccccaggacatttcttggcccctccttgcattttccgtttcaaaatgttgaggttaaaatacatcgaagcacagagggaagaaaatctcaggtcttctagaaatggcgatgtcttcatttaaaaataggactgatgggggcttggcaggggtctctaggatccaaaagaggttgagttgcatcctgcagcccaactgtccacatttagaagtgacaacattcatgaactaagtcaacatccaccaaaaataacatgaaataaagctcacagttt

SEQ ID NO: 480 - DNA, 599 bp, Homo sapiens; identical to SEQ ID NO: 192

SEQ ID NO: 481 - DNA, 321 bp, Homo sapiens
gccaggtgccaggtgaggctcagacaagaaaaagagcctggagtccctgggacaaaggcagggctccctggaaagtaccgtgtgtatttttccttcctctgggacacagcaggcctggggatttctcccttactcaagcagcaaggagatggcctaggagtgtccctggcacccagcctgaaccctactgagcctcaggcgtcctcatcccttttcacctcggagctcagcgtcttcctcagcagcacttccatgtcatctgccccgtgaaatcagcctaacgccgtttctcaatgacgtggatcgccctaggccaccgca

SEQ ID NO: 482 - DNA, 441 bp, Homo sapiens; identical to SEQ ID NO: 163

SEQ ID NO: 483 - DNA, 434 bp, Homo sapiens; identical to SEQ ID NO: 103

SEQ ID NO: 484 - DNA, 838 bp, Homo sapiens
cgaactgccagcctgcgcctttgcagccggccctcgctttgctgaagacgagcagctcccaccaaagtcttgcctccccttaccccgaaagccccgctcaggtcaaagagcctaaaagaaaagcccgggccgggcgcggtggctcacgcctgtaatcccagcactttgggaggccgaggcgggcggatcacgaggtcaggagatcgagaccatcccggctaaaacggtgaaaccccgtctctactaaaaatacaaaaaattagccgggcgtagtggcgggcgcctgtagtcccagctccttgggaggctgaggcaggagaatggcgtgaacccgggaggcggagcttgcagtgagccgagatcccgccactgcactccagcctgggcgacagagcgagactccgtctcaaaaaaaaaaaaaaaaaaagaaaagaaaagcccggagccatacactcacctggttgaagccataaagagttcaatatttcaagtgaaaatctgcctgttcgaaaataaaatattcacaaatgagcagtgtattagaagacaactgaattgcttctaagaatgggtctcactctgccatcacccaggctggagtgtggtggcaccatcatggctcactgcagccttgaactcctgagctcaagtcatcctcccacctcagccttccgagtagctggaactgcaggtgtgagccaccatgcctggctgatttgtctttttaaattttttatagagaccgagtctcaactatattgtccaggctggaaaagaacttctttccctccaagtgataaccttttccagacaagtcagcttaaaaactgacccaaag

SEQ ID NO: 485 - DNA, 816 bp, Homo sapiens
cttgggcgttgggtgaagtatccaggttgggcgcttccagcgctttctgtggcgggggaatgaaggcctaggtcagggaataggaaggtgtatcgccgccagagtgcggaacaccctcgccttgagggttcccacagtgacttgcaaaagtctagtgagacccgagaatgctgaggcgggacacgaagcatgtggttcttgtggttgcgacgctcgtgccgccatcttgggtgctggcggcggaaaccggtaccccaacttcccctcggtgcgaacctggagaagccaccccagctgtgagggacggttgcgcctcatggcccaggcaagggtaccttcgctggagcagtaccgcggacggatatcatgagggtggtgggacgttggcggaacgttggcggaacgttggcggtgtgagaggtgtgggggaatcattgggttggcgtttgcaatgcgttcctcccagctataggacaaagaggtgtcaactcaactgtgtcttcttagaagagcccattatttataggtgagtcattagtccctgtacaactaaggacaaggccaactgataactcagtaaataatcgagtccattttgtgcttgcgagttaggggcttaatttggggtggtttgcagattaagtactttcactgcatataataaacgtacaccagcaaaccactcatggaattcttaaaaaaacttctgagctagtttaccagtttcaaagactaattcagagagcatgttttacctattctaggctggactggaactcctggactcaagcgatctttccatttatcagggactac

SEQ ID NO: 486 - DNA, 516 bp, Homo sapiens
ccacaagcgaacgccaggcggtggcacgtgtcaatttccacagagtcctgctttgcggggtgtctgaatgcactgcacggggtctctgctcacacttgctggaaccaatcgtggcagattttagtccacaggtcgcttttccccatatttctttgtaaactcttcagcattcttacagaattttttacggtccttagagtattcttcagctaggtcagcccgaagcgggtgcttgggctgggggtcattcaccagtgctatgagggactggattacttggtcggttttggttgctggcttccagttttcagcactaattactggcagacagacctgccccttttcgtcgatgtttgggtgatagatctttgttttaaatgtgatcttcggtggtttgaatgggtactctgctggaaagttgatttctattctgaaggcccccttatcatatggagggttctccttcatcagcctcctgctggccgccatcttggatttggtgctgctccttcctcc

SEQ ID NO: 487 - DNA, 487 bp, Homo sapiens
agccaaaccatatcaggggtctttcagaaatgtacgttgaagatggagaacaactgatgtcaagacacattttggttgtaagggacagaagtccaactccaacgagcttgccaaggatggaacctgctggcaaacataaccaaactttgggaagggcagggtatggttaacctcaggtttctggaagcagagtgtacagtgctgtgccgtccctcttctctctgcttctctctgcgtattggccctatcctctcagtggggcaccctccctgagcagcgaacagcagccacaggaagctccagtgtcaatgcctcccacagctttccagagaagcagcagcctctttgttagctccgtatcaaagacatccacaggcagggctttgtgtgacccagtttgggtcacgtctttatttggggcccggaggaaatggatacaatgactacagcccatcatagaacctcatgtttagaggaccaaatttcc

SEQ ID NO: 488 - DNA, 1083 bp, Homo sapiens
cgctaggacctggagggctagtcggcgggctgcgcgtccggccgctagctgagctggaggccaccggccagagccgaccccaggagtgagagagacaggggcgtgcgtgagttccggcggcctgcaccgggcaaaccccgtaccttcccagcatcggctcagcaacccacgtgcatccaggccggtcaatgtcattgagtcacctccgcgccttggccaccctggagtcccgagaatccgaagttccagacaaatgcccaaactacattcctgcatgttcgaaagcgtaaattgcaaagcacaaatccagttgtagattgtggccgggagcagtggctcacgcctataatcccagcactttgggaggccgaggcggacagatcacgaggtcagcacttcgagaccagcatggccaacatggtgaagccccatctctactaaaaatacaaacattagccaggcatggtggtaggcccctgtaatcccagctactcggtaggctgaggcaggagaatcacttgaacccgggaggcagaggtttcagtgagctgagactgcaccattgcactccagcctgggcgacagaccaagactccatctcaaaaaaaaaaaaaaaaaagttatagattgtaaggaaaatacccccaaggaagttgaggacacagcagacttggactgtctccaaacctgttcattcttctgagtgcactgctcggagcatcctattgggcagcatatcctggcctcctttccagttcgatgtggtactatacctgatttctggccaataaaatatgagaggacatgaaattcaacagcccctgggcttggcttataaaaccttccatgcaatcctccacaccttttcacctctcagctgctgagacttttctaggcactacacagaagcagcctgggtctccagtagcaaaggagagcagatccttctcactatcctgcaccgaactgtgacatgagcaaaaaataaagtttttattttcttacaccattgagatttgaggattgctagagcagttagtcttcccagcctaatacagtattagtagaggacaattaggccag

SEQ ID NO: 489 - DNA, 1369 bp, Homo sapiens
tttgagccactgcatcccctagcggcgcccgggtggctgcagccgctggcccgaaaatgctgctcgggcgagcaggggtcaggcgggaaaagaagactccaaatccactctctgctcgcccccagggcaatgctgccaggagagggagtgggttcccccgcaggctatcccaccgatggggctgagagcttaatttggggttttatttgaattggagacattgttccctcttcgctcctctaccccataaaattccctacaaatgcaaaaattcgagatagaagaagccgtccctgaaagtaagttctgaaggattcctttcatgcggtgaaggaacaacaacaatattcaacttcaccttggtgtgtgagggtcgtcgtgttttaaaacactatccctgtagaaagattagtgaaatgtattggaagaagtagtggaaacgtgaatcttcctggtctcgcgtttggatcttctttggagtcctcaccttcttaaatctgatgtttgtttgaaatcagggaagctgaaagaaaaaatgaaaaatgcttctccgcgcgtcaatcgaggggtggatgcgccacgcagcgtgagcccagctcacagccacgcgtaagaccaaaagctgccatgggttctgcgcgcggagacctcagagccgaagagagaagtccccgcgtcagaaacgctgcggatgccaggtcttgaaaatgctgacttctgaggctgggcctcggcctggtctagcgagtccccttcctcccaaggagcagccggcggagctcgggtggaggaaagcgaggaggcgaccaggaggatgccgccgccgccgccgcagggcccggggcttctgcagggcgcaaggcctccctcaccagggtaaggggctggcgatcaacctggacgcctgggaccttgggagcaagcatcccgcagccgagcaggcgacggcgcggccaccgcctagagaggagccggggcccggggcggcgtgcgggtcggcagcagccggcttggcctatccgaaaccccaggcctggaagcggctgctttaggcgtcaagttgagcggggtatgtgtgtcctcttgggaaaaaggcagaagaaagaagcggagccgagccgagccgccgagtccctccccccggagccccggagccccggcgcctgcctgggcggtcccggccgcgcagacagaaaagaagccgggaatctgcggggctggggggcggggagcgacaccaaaggccagaaactgcagcacggcccgaggccctggcgagctgggcctgggggaggagaagtcccttcccattccagctcgatcaatcttgctgggctgcgatcggtcaataaaaacggtgtgaagcggc

SEQ ID NO: 490 - DNA, 220 bp, Homo sapiens; identical to SEQ ID NO: 164

SEQ ID NO: 491 - DNA, 237 bp, Homo sapiens; identical to SEQ ID NO: 135

SEQ ID NO: 492 - DNA, 1894 bp, Homo sapiens; identical to SEQ ID NO: 106

SEQ ID NO: 493 - DNA, 335 bp, Homo sapiens
gacgtccatatacacttctcccaaaatcctgtgcttaacacattgttactgagcacacaggcgtgctggggcaagcgacgcctgggaatatgaagcgaacgccacacactagaacgcgccctgggagctggcctccggtgggggacgcaggtgttgaagacataaccgcatgaccgagaaacctcagttttgctctgaaggccttcaactgcccggccgaggctcacccacaccaaggggaatcccttctcttaaagtcaactgatggtagatgtcaaccacagctacaaaacaccgtcacagcaacacctgggttagcgtttgattgaataaat

SEQ ID NO: 494 - DNA, 534 bp, Homo sapiens; identical to SEQ ID NO: 3

SEQ ID NO: 495 - DNA, 886 bp, Homo sapiens; identical to SEQ ID NO: 4

SEQ ID NO: 496 - DNA, 298 bp, Homo sapiens; identical to SEQ ID NO: 6

SEQ ID NO: 497 - DNA, 835 bp, Homo sapiens; identical to SEQ ID NO: 11

SEQ ID NO: 498 - DNA, 1118 bp, Homo sapiens; identical to SEQ ID NO: 14

SEQ ID NO: 499 - DNA, 363 bp, Homo sapiens; identical to SEQ ID NO: 17

SEQ ID NO: 500 - DNA, 1761 bp, Homo sapiens; identical to SEQ ID NO: 22

SEQ ID NO: 501 - DNA, 572 bp, Homo sapiens; identical to SEQ ID NO: 30

SEQ ID NO: 502 - DNA, 8459 bp, Homo sapiens; identical to SEQ ID NO: 31

SEQ ID NO: 503 - DNA, 204 bp, Homo sapiens; identical to SEQ ID NO: 42

SEQ ID NO: 504 - DNA, 1538 bp, Homo sapiens; identical to SEQ ID NO: 46

SEQ ID NO: 505 - DNA, 1376 bp, Homo sapiens; identical to SEQ ID NO: 57

SEQ ID NO: 506 - DNA, 445 bp, Homo sapiens; identical to SEQ ID NO: 59

SEQ ID NO: 507 - DNA, 2428 bp, Homo sapiens; identical to SEQ ID NO: 60

SEQ ID NO: 508 - DNA, 292 bp, Homo sapiens; identical to SEQ ID NO: 69

SEQ ID NO: 509 - DNA, 1599 bp, Homo sapiens; identical to SEQ ID NO: 72

SEQ ID NO: 510 - DNA, 290 bp, Homo sapiens; identical to SEQ ID NO: 78

SEQ ID NO: 511 - DNA, 811 bp, Homo sapiens; identical to SEQ ID NO: 82

SEQ ID NO: 512 - DNA, 550 bp, Homo sapiens; identical to SEQ ID NO: 83

SEQ ID NO: 513 - DNA, 6675 bp, Homo sapiens; identical to SEQ ID NO: 88

SEQ ID NO: 514 - DNA, 434 bp, Homo sapiens; identical to SEQ ID NO: 103

SEQ ID NO: 515 - DNA, 1894 bp, Homo sapiens; identical to SEQ ID NO: 106

SEQ ID NO: 516 - DNA, 237 bp, Homo sapiens; identical to SEQ ID NO: 135

SEQ ID NO: 517 - DNA, 441 bp, Homo sapiens; identical to SEQ ID NO: 163

SEQ ID NO: 518 - DNA, 220 bp, Homo sapiens; identical to SEQ ID NO: 164

SEQ ID NO: 519 - DNA, 634 bp, Homo sapiens; identical to SEQ ID NO: 178

SEQ ID NO: 520 - DNA, 658 bp, Homo sapiens; identical to SEQ ID NO: 186

SEQ ID NO: 521 - DNA, 599 bp, Homo sapiens; identical to SEQ ID NO: 192

SEQ ID NO: 522 - DNA, 1164 bp, Homo sapiens; identical to SEQ ID NO: 66

SEQ ID NO: 523 - DNA, 1207 bp, Homo sapiens; identical to SEQ ID NO: 90

SEQ ID NO: 524 - DNA, 1856 bp, Homo sapiens; identical to SEQ ID NO: 93

SEQ ID NO: 525 - DNA, 2147 bp, Homo sapiens; identical to SEQ ID NO: 108

SEQ ID NO: 526 - DNA, 289 bp, Homo sapiens; identical to SEQ ID NO: 133

SEQ ID NO: 527 - DNA, 400 bp, Homo sapiens; identical to SEQ ID NO: 136

SEQ ID NO: 528 - DNA, 323 bp, Homo sapiens; identical to SEQ ID NO: 150

SEQ ID NO: 529 - DNA, 575 bp, Homo sapiens; identical to SEQ ID NO: 154

SEQ ID NO: 530 - DNA, 624 bp, Homo sapiens; identical to SEQ ID NO: 156

SEQ ID NO: 531 - DNA, 371 bp, Homo sapiens; identical to SEQ ID NO: 157

SEQ ID NO: 532 - DNA, 376 bp, Homo sapiens; identical to SEQ ID NO: 166

SEQ ID NO: 533 - DNA, 4737 bp, Homo sapiens; identical to SEQ ID NO: 169

SEQ ID NO: 534 - DNA, 276 bp, Homo sapiens; identical to SEQ ID NO: 171

SEQ ID NO: 535 - DNA, 291 bp, Homo sapiens; identical to SEQ ID NO: 172

SEQ ID NO: 536 - DNA, 1290 bp, Homo sapiens; identical to SEQ ID NO: 176

SEQ ID NO: 537 - DNA, 657 bp, Homo sapiens; identical to SEQ ID NO: 183

SEQ ID NO: 538 - DNA, 2110 bp, Homo sapiens; identical to SEQ ID NO: 185

SEQ ID NO: 539 - DNA, 316 bp, Homo sapiens; identical to SEQ ID NO: 188

SEQ ID NO: 540 - DNA, 882 bp, Homo sapiens; identical to SEQ ID NO: 191

SEQ ID NO: 541 - DNA, 1514 bp, Homo sapiens; identical to SEQ ID NO: 195

SEQ ID NO: 542 - DNA, 1784 bp, Homo sapiens
gcttcccaacacaaaccacccaccactgttaggttttctctctcctcacttctacgtaggccattcctacagatacccctacagtatctttcatcttattgactggtcagaattctaaatgtctttcaaggaccagtgctatttcaccttctccaggaagtgcttcatgaccgttctcgggttagaaatatccctcttggccaagcacagcggctcactcctgtaatcccagcattttgggattacaggcgtgagtcactgcatctggcctcacacagtcattctgaagagtgtaagcctagcacagggcctggtatagagtaagcactcaagaaacacaactcctttcctcccttcgactcatcaagaaagctgagccgagggagcatccacttcccccaagcctcccagaacagggaatttcctctgcgcatttaactttgagcaagggtattggggtttgactctccaaaatgggaaatgatccacggcagtaacctggccaagccctgctcagtggcctgccatgatctggtccaggcccacgctgttgccctcctgcccaccgaacattcaggactggagaggaggctcaccctggagcgggctaaggaagtgaggtcatagcctgtgacagcaatttgggagttgggagaggcctgccagcccctgccagttcctggaccttcacagagcagttgtttcctatggttcggctggaatttcaggcaggaatgttgagcagacggcagtggggtaagtgtaaattccagaggctgaggcaacattttgcagaggagttttttttccctgccagcctctggcctcaagcaagcccttcctgggagtgggaggaattcgttgggcttggatcgcctgggatgcagcttctcctatggtgaaggggaaatgatgggtgcactactatgagccaggcactttacatggatgtaacccttatatggtcaatgggatttaacctgcaaactgaagtcaacattattttctttttctgtccttttcagcttgcttgctttcttcttatccctaaataaaatctcaggcaggtcttgtaggttttctgggccccttcagtttccaagacagtcttaaccttgtttttgttttttgttttttttgtttttgagacagggtctcactctgttccccaggctggagtgcagtggtgcagtcagagctcactgcagcctccaccttctaagctcaagtgatcccctgatgtcagcctcccactacaggtgcatgccaccatgcctgactatttatttatttatttatttatttatttatgagacagagtctcattctgtcaccaggctggagtgcagtggcatgacctcagctcactacaacctccacctcccgagttcaagcgattctcctgcctcagccttccgagtagctgggaggctgagatgggaggattgcttgagcctgggaggtggagactacaatgagccatgattgtgccactgtactcagcctgggtgactgggtgacaatgcaggaccttgtttcaaaatttaaaaaggatgagcccttcagccttcagcctaaaagtctgctcaccactatcactctacattgtgaattaacccttcacgtgcagccctccctcttctcatccccagctagacggcttattggtgtatcctcaactgtccagctaataggcttgttgatacgttgattcactgatgaatgaccctttgaataacttggcagcatcatctcatatttgtacattgtacagttcacaaaac
